(19) United States
(12) Patent Application Publication
(10) Pub. No.: US 2024/0109955 A1
(43) Pub. Date: Apr. 4, 2024

(54) ANTI-SARS-COV-2 ANTIGEN BINDING POLYPEPTIDES, POLYPEPTIDE COMPLEXES AND METHODS OF USE THEREOF

(71) Applicants: ModeX Therapeutics, Inc., Natick, MA (US); The United States of America, As Represented by the Secretary, Dept. of Health and Human Services, Bethesda, MD (US)

(72) Inventors: Juan LI, Boston, MA (US); Chi-Jen WEI, Weston, MA (US); Ronnie R. WEI, Weston, MA (US); Zhi-Yong YANG, Newton Center, MA (US); John R. MASCOLA, Rockville, MD (US); Gary J. NABEL, Delray Beach, FL (US); John MISASI, Bethesda, MD (US); Amarendra PEGU, Bethesda, MD (US); Lingshu WANG, Bethesda, MD (US); Tongqing ZHOU, Bethesda, MD (US); Misook CHOE, Bethesda, MD (US); Olamide K. OLONINIYI, Bethesda, MD (US); Bingchun ZHAO, Bethesda, MD (US); Yi ZHANG, Bethesda, MD (US); Eun Sung YANG, Bethesda, MD (US); Man CHEN, Bethesda, MD (US); Kwanyee LEUNG, Bethesda, MD (US); Wei SHI, Bethesda, MD (US); Nancy J. SULLIVAN, Bethesda, MD (US); Peter D. KWONG, Bethesda, MD (US); Richard A. KOUP, Bethesda, MD (US); Barney S. GRAHAM, Smyrna, GA (US); Peng HE, Natick, MA (US)

(21) Appl. No.: 18/345,478

(22) Filed: Jun. 30, 2023

Related U.S. Application Data
(60) Provisional application No. 63/357,331, filed on Jun. 30, 2022.
(60) Provisional application No. 63/381,842, filed on Nov. 1, 2022.
(60) Provisional application No. 63/481,368, filed on Jan. 24, 2023.
(60) Provisional application No. 63/357,336, filed on Jun. 30, 2022.
(60) Provisional application No. 63/357,873, filed on Jul. 1, 2022.
(60) Provisional application No. 63/381,850, filed on Nov. 1, 2022.
(60) Provisional application No. 63/404,473, filed on Sep. 7, 2022.
(60) Provisional application No. 63/433,719, filed on Dec. 19, 2022.

(51) Int. Cl. C07K 16/10; A61P 31/14; G01N 33/569

(52) U.S. Cl. CPC C07K 16/1003; A61P 31/14; G01N 33/56983; C07K 2317/24; C07K 2317/31; C07K 2317/522; C07K 2317/524; C07K 2317/526; C07K 2317/92

(57) ABSTRACT

Disclosed are antigen binding polypeptides and antigen binding polypeptide complexes (e.g., antibodies and antigen binding fragments thereof) having certain structural and/or functional features. Also disclosed are polynucleotides and vectors encoding such polypeptides and polypeptide complexes; host cells, pharmaceutical compositions and kits containing such polypeptides and polypeptide complexes; and methods of using such polypeptides and polypeptide complexes.

### CROSS REFERENCE TO RELATED APPLICATIONS

[0001] This application claims the priority benefit of U.S. Provisional Application No. 63/357,331, filed Jun. 30, 2022; U.S. Provisional Application No. 63/357,336, filed Jun. 30, 2022; U.S. Provisional Application No. 63/357,873, filed Jul. 1, 2022; U.S. Provisional Application No. 63/404,473, filed Sep. 7, 2022; U.S. Provisional Application No. 63/381,842, filed Nov. 1, 2022; U.S. Provisional Application No. 63/381,850, filed Nov. 1, 2022; U.S. Provisional Application No. 63/433,719, filed Dec. 9, 2022; and U.S. Provisional Application No. 63/481,368, filed Jan. 24, 2023, which are all incorporated herein by reference in their entireties.

### STATEMENT REGARDING FEDERALLY SPONSORED RESEARCH OR DEVELOPMENT

[0002] This invention was made in the performance of a Cooperative Research and Development Agreement with the National Institutes of Health, an Agency of the Department of Health and Human Services. The Government has certain rights in this invention.

### REFERENCE TO SEQUENCE LISTING SUBMITTED ELECTRONICALLY

[0003] The content of the electronically submitted sequence listing (Name: 4850_0110003_SEQLISTING_ST26.xml; Size: 1,589,914 bytes; Date of Creation: Jun. 29, 2023) is herein incorporated by reference in its entirety.

### FIELD

[0004] The present disclosure relates to anti-severe acute respiratory syndrome coronavirus 2 (anti-SARS-CoV-2) antigen binding polypeptides and polypeptide complexes (e.g., antibodies and antigen binding fragments thereof) having certain structural and/or functional features. The present disclosure also relates to polynucleotides and vectors encoding such polypeptides and polypeptide complexes; host cells; pharmaceutical compositions and kits containing such polypeptides and polypeptide complexes; and methods of using such polypeptides and polypeptide complexes.

### BACKGROUND

[0005] The outbreak of severe acute respiratory syndrome coronavirus (SARS-CoV-2) has caused over 450 million infections and over 6 million deaths worldwide. SARS-CoV-2 is the strain of coronavirus that causes COVID-19 (coronavirus disease 2019). Sequencing and publication of the original Wuhan Hu-1 (WA-1) genome enabled rapid vaccine design and production of spike proteins for therapeutic antibody development. However, persistent circulation of viruses during human pandemics leads to genetic variation that resists containment and eradication. While cellular and humoral immune responses are needed for optimal protection against viral infection, neutralizing antibodies play a major role in prevention and eradication of pathogens.

[0006] SARS-CoV-2 spike protein mutants and SARS-CoV-2 variants Alpha (B.1.1.7), Beta (B.1.351), Gamma (P.1), Delta (B.1.617.2), Epsilon variant (B.1.427), and Omicron (B.1.1.529) have emerged to contain mutations that are resistant to current therapies, have increased pathogenicity, and evade current vaccines. This led to their classification as variants of concern (VOCs).

[0007] Therapeutic antibodies have emerged as an important class of agents for treating human diseases and disorders. Therapeutic antibodies have been engineered to have specificity for two or more different antigens or epitopes (i.e., “multispecific” antibodies that are, for example, bispecific, trispecific or tetraspecific). Multispecific antibodies have been used to form multi-targeting strategies to treat human diseases and disorders, and are an important technological platform for developing neutralizing antibody-based therapeutics for preventing and treating SARS-CoV-2 infection and COVID-19.

[0008] There is a need for improved therapies to prevent and treat SARS-CoV-2 infection and COVID-19. There is a need for therapeutic antibodies with broad VOC reactivity and resistance to SARS-CoV-2 escape. There is also a need for therapeutic antibodies that are easier to manufacture and administer than current therapeutic antibody cocktails. There is also a need to treat or prevent SARS-CoV-2 infection and COVID-19 in immunocompromised individuals who cannot mount an effective immune response through vaccinations.

### BRIEF SUMMARY

[0009] Provided herein is a multispecific antibody selected from the group consisting of:
[0010] (a) an antigen binding polypeptide having a structure represented by:
   [0011] VL1-L1-VH1 or VH1-L2-VL1;
[0012] wherein:
   [0013] VL1 is a first immunoglobulin light chain variable region that specifically binds to a severe acute respiratory syndrome coronavirus 2 (SARS-CoV-2) protein;
   [0014] VH1 is a first immunoglobulin heavy chain variable region that specifically binds to a SARS-CoV-2 protein; and
   [0015] L1 and L2 are amino acid linkers; or
[0016] an antigen binding polypeptide having a structure represented by:
   [0017] VL1-L1-VL2-L2-VH2-L3-VH1;
   [0018] VL1-L1-VH2-L2-VL2-L3-VH1;
   [0019] VH1-L4-VH2-L5-VL2-L6-VL1; or
   [0020] VH1-L4-VL2-L5-VH2-L6-VL1;
[0021] wherein:
   [0022] VL1 is a first immunoglobulin light chain variable region that specifically binds to a SARS-CoV-2 protein;
   [0023] VL2 is a second immunoglobulin light chain variable region that specifically binds to a SARS-CoV-2 protein;
   [0024] VH1 is a first immunoglobulin heavy chain variable region that specifically binds to a SARS-CoV-2 protein;
   [0025] VH2 is a second immunoglobulin heavy chain variable region that specifically binds to a SARS-CoV-2 protein; and
   [0026] L1-L6 are amino acid linkers; and
   [0027] wherein (a) is selected from any one of the more specific embodiments provided herein for an antigen binding polypeptide in an antigen binding polypeptide complex having no more than three polypeptide chains;
[0028] (b) an antigen binding polypeptide complex comprising a first polypeptide, a second polypeptide, a third polypeptide, and a fourth polypeptide;
[0029] wherein the first polypeptide has a structure represented by:
   [0030] VL1-L1-CL;
[0031] wherein the second polypeptide has a structure represented by:
   [0032] VH1-L2-CH1;
[0033] wherein the third polypeptide has a structure represented by:
   [0034] VH2-L3-VH3-L4-CH1;
[0035] wherein the fourth polypeptide has a structure represented by:
   [0036] VL3-L5-VL2-L6-CL; and
[0037] wherein:
   [0038] VL1 is a first immunoglobulin light chain variable region that specifically binds to a SARS-CoV-2 protein;
   [0039] VL2 is a second immunoglobulin light chain variable region that specifically binds to a SARS-CoV-2 protein;
   [0040] VL3 is a third immunoglobulin light chain variable region that specifically binds to a SARS-CoV-2 protein;
   [0041] VH1 is a first immunoglobulin heavy chain variable region that specifically binds to a SARS-CoV-2 protein;
   [0042] VH2 is a second immunoglobulin heavy chain variable region that specifically binds to a SARS-CoV-2 protein;
   [0043] VH3 is a third immunoglobulin heavy chain variable region that specifically binds to a SARS-CoV-2 protein;
   [0044] CH1 is an immunoglobulin heavy chain constant region 1;
   [0045] CL is an immunoglobulin light chain constant region; and
   [0046] L1-L6 are amino acid linkers; and
[0047] (c) an antigen binding polypeptide having a structure represented by:
   [0048] VL1-L1-VH1 or VH1-L2-VL1;
[0049] wherein:
   [0050] VL1 is a first immunoglobulin light chain variable region that specifically binds to a SARS-CoV-2 protein;
   [0051] VH1 is a first immunoglobulin heavy chain variable region that specifically binds to a SARS-CoV-2 protein; and
   [0052] L1 and L2 are amino acid linkers; or
[0053] an antigen binding polypeptide having a structure represented by:
   [0054] VL1-L1-VL2-L2-VH2-L3-VH1;
   [0055] VL1-L1-VH2-L2-VL2-L3-VH1;
   [0056] VH1-L4-VH2-L5-VL2-L6-VL1; or
   [0057] VH1-L4-VL2-L5-VH2-L6-VL1;
[0058] wherein:
   [0059] VL1 is a first immunoglobulin light chain variable region that specifically binds to a SARS-CoV-2 protein;
   [0060] VL2 is a second immunoglobulin light chain variable region that specifically binds to a SARS-CoV-2 protein;
   [0061] VH1 is a first immunoglobulin heavy chain variable region that specifically binds to a SARS-CoV-2 protein;
   [0062] VH2 is a second immunoglobulin heavy chain variable region that specifically binds to a SARS-CoV-2 protein; and
   [0063] L1-L6 are amino acid linkers;
[0064] wherein (c) is selected from any one of the more specific embodiments provided herein for an antigen binding polypeptide in an antigen binding polypeptide complex having no more than three polypeptide chains; and
[0065] wherein the antigen binding polypeptide further comprises one or more immunoglobulin heavy chain constant region 1 (CH1) and/or one or more immunoglobulin light chain constant region (CL) between any one of the variable regions and/or amino acid linkers (e.g., between VL1 and L1, between L1 and VH1, between VH1 and L2, between L2 and VL1, between L1 and VL2, between VL2 and L2, between L2 and VH2, between VH2 and L3, between L3 and VH1, between VL1 and L1, between L1 and VH2, between VH2 and L2, between, L2 and VL2, between VL2 and L3, between L3 and VH1, between VH1 and L4, between L4 and VH2, between VH2 and L5, between L5 and VL2, between VL2 and L6, between L6 and VL1, between VH1 and L4, between L4 and VL2, between L4 and VL2, between VL2 and L5, between L5 and VH2, between VH2 and L6, or between L6 and VL1).

[0066] Also provided herein is a multispecific antibody comprising a first polypeptide, a second polypeptide, a third polypeptide, and a fourth polypeptide;
[0067] wherein the first polypeptide has a structure represented by VL1-L1-CL;
[0068] wherein the second polypeptide has a structure represented by VH1-L2-CH1-L3-Fc;
[0069] wherein the third polypeptide has a structure represented by VH2-L4-VH3-L5-CH1-L6-Fc;
[0070] wherein the fourth polypeptide has a structure represented by VL3-L7-VL2-L8-CL; and
[0071] wherein VL1 is a first immunoglobulin light chain variable region that specifically binds to a SARS-CoV-2 protein;
[0072] VL2 is a second immunoglobulin light chain variable region that specifically binds to a SARS-CoV-2 protein;
[0073] VL3 is a third immunoglobulin light chain variable region that specifically binds to a SARS-CoV-2 protein;
[0074] VH1 is a first immunoglobulin heavy chain variable region that specifically binds to a SARS-CoV-2 protein;
[0075] VH2 is a second immunoglobulin heavy chain variable region that specifically binds to a SARS-CoV-2 protein;
[0076] VH3 is a third immunoglobulin heavy chain variable region that specifically binds to a SARS-CoV-2 protein;
[0077] Fc is a region comprising an immunoglobulin heavy chain constant region 2 (CH2), an immunoglobulin heavy chain constant region 3 (CH3), and optionally, an immunoglobulin hinge;
[0078] CH1 is an immunoglobulin heavy chain constant region 1;
[0079] CL is an immunoglobulin light chain constant region; and
[0080] L1-L8 are amino acid linkers.

[0081] Provided herein is an antigen binding polypeptide having a structure represented by VL1-L1-VH1 or VH1-L2-VL1; wherein VL1 is a first immunoglobulin light chain variable region that specifically binds to a severe acute respiratory syndrome coronavirus 2 (SARS-CoV-2) protein; VH1 is a first immunoglobulin heavy chain variable region that specifically binds to a SARS-CoV-2 protein; and L1 and L2 are amino acid linkers.

[0082] Provided herein is an antigen binding polypeptide having a structure represented by VL1-L1-VL2-L2-VH2-L3-VH1; VL1-L1-VH2-L2-VL2-L3-VH1; VH1-L4-VH2-L5-VL2-L6-VL1; or VH1-L4-VL2-L5-VH2-L6-VL1; wherein VL1 is a first immunoglobulin light chain variable region that specifically binds to a SARS-CoV-2 protein; VL2 is a second immunoglobulin light chain variable region that specifically binds to a SARS-CoV-2 protein; VH1 is a first immunoglobulin heavy chain variable region that specifically binds to a SARS-CoV-2 protein; VH2 is a second immunoglobulin heavy chain variable region that specifically binds to a SARS-CoV-2 protein; and L1-L6 are amino acid linkers.

[0083] Also provided herein is an antigen binding polypeptide having a structure represented by VL1-L1-VL2-L2-VH2-L3-VH1 or VH1-L4-VH2-L5-VL2-L6-VL1; wherein VL1 is a first immunoglobulin light chain variable region that specifically binds to a severe acute respiratory syndrome coronavirus 2 (SARS-CoV-2) protein; VL2 is a second immunoglobulin light chain variable region that specifically binds to a SARS-CoV-2 protein; VH1 is a first immunoglobulin heavy chain variable region that specifically binds to a SARS-CoV-2 protein; VH2 is a second immunoglobulin heavy chain variable region that specifically binds to a SARS-CoV-2 protein; and L1-L6 are amino acid linkers.

[0084] Also provided herein is an antigen binding polypeptide having a structure represented by VL1-L1-VH2-L2-VL2-L3-VH1 or VH1-L4-VL2-L5-VH2-L6-VL1; wherein VL1 is a first immunoglobulin light chain variable region that specifically binds to a severe acute respiratory syndrome coronavirus 2 (SARS-CoV-2) protein; VL2 is a second immunoglobulin light chain variable region that specifically binds to a SARS-CoV-2 protein; VH1 is a first immunoglobulin heavy chain variable region that specifically binds to a SARS-CoV-2 protein; VH2 is a second immunoglobulin heavy chain variable region that specifically binds to a SARS-CoV-2 protein; and L1-L6 are amino acid linkers.

[0085] Also provided herein is an antigen binding polypeptide complex comprising a first polypeptide and a second polypeptide; wherein the first polypeptide has a structure represented by VL1-L1-VL2-L2-VH2-L3-VH1; VL1-L1-VH2-L2-VL2-L3-VH1; VH1-L4-VH2-L5-VL2-L6-VL1; or VH1-L4-VL2-L5-VH2-L6-VL1; wherein the second polypeptide has a structure represented by VL3-L7-VL4-L8-VH4-L9-VH3; VL3-L7-VH4-L8-VL4-L9-VH3; VH3-L10-VH4-L11-VL4-L12-VL3; or VH3-L10-VL4-L11-VH4-L12-VL3; wherein VL1 is a first immunoglobulin light chain variable region that specifically binds to a SARS-CoV-2 protein; VL2 is a second immunoglobulin light chain variable region that specifically binds to a SARS-CoV-2 protein; VL3 is a third immunoglobulin light chain variable region that specifically binds to a SARS-CoV-2 protein; VL4 is a fourth immunoglobulin light chain variable region that specifically binds to a SARS-CoV-2 protein; VH1 is a first immunoglobulin heavy chain variable region that specifically binds to a SARS-CoV-2 protein; VH2 is a second immunoglobulin heavy chain variable region that specifically binds to a SARS-CoV-2 protein; VH3 is a third immunoglobulin heavy chain variable region that specifically binds to a SARS-CoV-2 protein; VH4 is a fourth immunoglobulin heavy chain variable region that specifically binds to a SARS-CoV-2 protein; and L1-L12 are amino acid linkers.

[0086] Also provided herein is an antigen binding polypeptide complex comprising a first polypeptide and a second polypeptide; wherein the first polypeptide has a structure represented by VL1-L1-VH1 or VH1-L2-VL1; wherein the second polypeptide has a structure represented by VL2-L3-VH2 or VH2-L4-VL2; wherein VL1 is a first immunoglobulin light chain variable region that specifically binds to a SARS-CoV-2 protein; VH1 is a first immunoglobulin heavy chain variable region that specifically binds to a SARS-CoV-2 protein; VL2 is a second immunoglobulin light chain variable region that specifically binds to a SARS-CoV-2 protein; VH2 is a second immunoglobulin heavy chain variable region that specifically binds to a SARS-CoV-2 protein; and L1-L4 are amino acid linkers.

[0087] Also provided herein is an antigen binding polypeptide complex comprising a first polypeptide and a second polypeptide; wherein the first polypeptide has a structure represented by VL1-L1-VH1-L2-Fc or VH1-L3-VL1-L4-Fc; wherein the second polypeptide has a structure represented by VL2-L5-VH2-L6-Fc or VH2-L7-VL2-L8-Fc; wherein VL1 is a first immunoglobulin light chain variable region that specifically binds to a SARS-CoV-2 protein; VH1 is a first immunoglobulin heavy chain variable region that specifically binds to a SARS-CoV-2 protein; VL2 is a second immunoglobulin light chain variable region that specifically binds to a SARS-CoV-2 protein; VH2 is a second immunoglobulin heavy chain variable region that specifically binds to a SARS-CoV-2 protein; Fc is a region comprising an immunoglobulin heavy chain constant region 2 (CH2), an immunoglobulin heavy chain constant region 3 (CH3), and optionally, an immunoglobulin hinge; and L1-L8 are amino acid linkers.

[0088] Also provided herein is an antigen binding polypeptide complex comprising a first polypeptide and a second polypeptide; wherein the first polypeptide has a structure represented by VL1-L1-VL2-L2-VH2-L3-VH1 or VH1-L4-VH2-L5-VL2-L6-VL1; wherein the second polypeptide has a structure represented by VL3-L7-VL4-L8-VH4-L9-VH3 or VH3-L10-VH4-L11-VL4-L12-VL3; wherein VL1 is a first immunoglobulin light chain variable region that specifically binds to a SARS-CoV-2 protein; VL2 is a second immunoglobulin light chain variable region that specifically binds to a SARS-CoV-2 protein; VL3 is a third immunoglobulin light chain variable region that specifically binds to a SARS-CoV-2 protein; VL4 is a fourth immunoglobulin light chain variable region that specifically binds to a SARS-CoV-2 protein; VH1 is a first immunoglobulin heavy chain variable region that specifically binds to a SARS-CoV-2 protein; VH2 is a second immunoglobulin heavy chain variable region that specifically binds to a SARS-CoV-2 protein; VH3 is a third immunoglobulin heavy chain variable region that specifically binds to a SARS-CoV-2 protein; VH4 is a fourth immunoglobulin heavy chain variable region that specifically binds to a SARS-CoV-2 protein; and L1-L12 are amino acid linkers.

[0089] Also provided herein is an antigen binding polypeptide complex comprising a first polypeptide and a second polypeptide; wherein the first polypeptide has a structure represented by VL1-L1-VH2-L2-VL2-L3-VH1 or VH1-L4-VL2-L5-VH2-L6-VL1; wherein the second polypeptide has a structure represented by VL3-L7-VH4-L8-VL4-L9-VH3 or VH3-L10-VL4-L11-VH4-L12-VL3; wherein VL1 is a first immunoglobulin light chain variable region that specifically binds to a SARS-CoV-2 protein; VL2 is a second immunoglobulin light chain variable region that specifically binds to a SARS-CoV-2 protein; VL3 is a third immunoglobulin light chain variable region that specifically binds to a SARS-CoV-2 protein; VL4 is a fourth immunoglobulin light chain variable region that specifically binds to a SARS-CoV-2 protein; VH1 is a first immunoglobulin heavy chain variable region that specifically binds to a SARS-CoV-2 protein; VH2 is a second immunoglobulin heavy chain variable region that specifically binds to a SARS-CoV-2 protein; VH3 is a third immunoglobulin heavy chain variable region that specifically binds to a SARS-CoV-2 protein; VH4 is a fourth immunoglobulin heavy chain variable region that specifically binds to a SARS-CoV-2 protein; and L1-L12 are amino acid linkers.

[0090] Also provided herein is an antigen binding polypeptide having a structure represented by VL1-L1-VL2-L2-VH2-L3-VH1-L4-Fc; VL1-L1-VH2-L2-VL2-L3-VH1-L4-Fc; VH1-L5-VH2-L6-VL2-L7-VL1-L8-Fc; or VH1-L5-VL2-L6-VH2-L7-VL1-L8-Fc; wherein VL1 is a first immunoglobulin light chain variable region that specifically binds to a SARS-CoV-2 protein; VL2 is a second immunoglobulin light chain variable region that specifically binds to a SARS-CoV-2 protein; VH1 is a first immunoglobulin heavy chain variable region that specifically binds to a SARS-CoV-2 protein; VH2 is a second immunoglobulin heavy chain variable region that specifically binds to a SARS-CoV-2 protein; Fc is a region comprising an immunoglobulin heavy chain constant region 2 (CH2), an immunoglobulin heavy chain constant region 3 (CH3), and optionally, an immunoglobulin hinge; and L1-L8 are amino acid linkers.

[0091] Also provided herein is an antigen binding polypeptide having a structure represented by VL1-L1-VL2-L2-VH2-L3-VH1-L4-Fc or VH1-L5-VH2-L6-VL2-L7-VL1-L8-Fc; wherein VL1 is a first immunoglobulin light chain variable region that specifically binds to a SARS-CoV-2 protein; VL2 is a second immunoglobulin light chain variable region that specifically binds to a SARS-CoV-2 protein; VH1 is a first immunoglobulin heavy chain variable region that specifically binds to a SARS-CoV-2 protein; VH2 is a second immunoglobulin heavy chain variable region that specifically binds to a SARS-CoV-2 protein; Fc is a region comprising an immunoglobulin heavy chain constant region 2 (CH2), an immunoglobulin heavy chain constant region 3 (CH3), and optionally, an immunoglobulin hinge; and L1-L8 are amino acid linkers.

[0092] Also provided herein is an antigen binding polypeptide having a structure represented by VL1-L1-VH2-L2-VL2-L3-VH1-L4-Fc or VH1-L5-VL2-L6-VH2-L7-VL1-L8-Fc; wherein VL1 is a first immunoglobulin light chain variable region that specifically binds to a SARS-CoV-2 protein; VL2 is a second immunoglobulin light chain variable region that specifically binds to a SARS-CoV-2 protein; VH1 is a first immunoglobulin heavy chain variable region that specifically binds to a SARS-CoV-2 protein; VH2 is a second immunoglobulin heavy chain variable region that specifically binds to a SARS-CoV-2 protein; Fc is a region comprising an immunoglobulin heavy chain constant region 2 (CH2), an immunoglobulin heavy chain constant region 3 (CH3), and optionally, an immunoglobulin hinge; and L1-L8 are amino acid linkers.

[0093] Also provided herein is an antigen binding polypeptide complex comprising a first polypeptide and a second polypeptide; wherein the first polypeptide has a structure represented by VL1-L1-VL2-L2-VH2-L3-VH1-L4-Fc; VL1-L1-VH2-L2-VL2-L3-VH1-L4-Fc; VH1-L5-VH2-L6-VL2-L7-VL1-L8-Fc; or VH1-L5-VL2-L6-VH2-L7-VL1-L8-Fc; wherein the second polypeptide has a structure represented by Fc; VL3-L9-VL4-L10-VH4-L11-VH3-L12-Fc; VL3-L9-VH4-L10-VL4-L11-VH3-L12-Fc; VH3-L13-VH4-L14-VL4-L15-VL3-L16-Fc; or VH3-L13-VL4-L14-VH4-L15-VL3-L16-Fc; wherein VL1 is a first immunoglobulin light chain variable region that specifically binds to a SARS-CoV-2 protein; VL2 is a second immunoglobulin light chain variable region that specifically binds to a SARS-CoV-2 protein; VL3 is a third immunoglobulin light chain variable region that specifically binds to a SARS-CoV-2 protein; VL4 is a fourth immunoglobulin light chain variable region that specifically binds to a SARS-CoV-2 protein; VH1 is a first immunoglobulin heavy chain variable region that specifically binds to a SARS-CoV-2 protein; VH2 is a second immunoglobulin heavy chain variable region that specifically binds to a SARS-CoV-2 protein; VH3 is a third immunoglobulin heavy chain variable region that specifically binds to a SARS-CoV-2 protein; VH4 is a fourth immunoglobulin heavy chain variable region that specifically binds to a SARS-CoV-2 protein; Fc is a region comprising an immunoglobulin heavy chain constant region 2 (CH2), an immunoglobulin heavy chain constant region 3 (CH3), and optionally, an immunoglobulin hinge; and L1-L16 are amino acid linkers.

[0094] Also provided herein is an antigen binding polypeptide complex comprising a first polypeptide and a second polypeptide; wherein the first polypeptide has a structure represented by VL1-L1-VL2-L2-VH2-L3-VH1-L4-Fc or VH1-L5-VH2-L6-VL2-L7-VL1-L8-Fc; wherein the second polypeptide has a structure represented by Fc; VL3-L9-VL4-L10-VH4-L11-VH3-L12-Fc; or VH3-L13-VH4-L14-VL4-L15-VL3-L16-Fc; wherein VL1 is a first immunoglobulin light chain variable region that specifically binds to a SARS-CoV-2 protein; VL2 is a second immunoglobulin light chain variable region that specifically binds to a SARS-CoV-2 protein; VL3 is a third immunoglobulin light chain variable region that specifically binds to a SARS-CoV-2 protein; VL4 is a fourth immunoglobulin light chain variable region that specifically binds to a SARS-CoV-2 protein; VH1 is a first immunoglobulin heavy chain variable region that specifically binds to a SARS-CoV-2 protein; VH2 is a second immunoglobulin heavy chain variable region that specifically binds to a SARS-CoV-2 protein; VH3 is a third immunoglobulin heavy chain variable region that specifically binds to a SARS-CoV-2 protein; VH4 is a fourth immunoglobulin heavy chain variable region that specifically binds to a SARS-CoV-2 protein; Fc is a region comprising an immunoglobulin heavy chain constant region 2 (CH2), an immunoglobulin heavy chain constant region 3 (CH3), and optionally, an immunoglobulin hinge; and L1-L16 are amino acid linkers.

[0095] Also provided herein is an antigen binding polypeptide complex comprising a first polypeptide and a second polypeptide; wherein the first polypeptide has a structure represented by VL1-L1-VH2-L2-VL2-L3-VH1-L4-Fc or VH1-L5-VL2-L6-VH2-L7-VL1-L8-Fc; wherein the second polypeptide has a structure represented by Fc; VL3-L9-VH4-L10-VL4-L11-VH3-L12-Fc or VH3-L13-VL4-L14-VH4-L15-VL3-L16-Fc; wherein VL1 is a first immunoglobulin light chain variable region that specifically binds to a SARS-CoV-2 protein; VL2 is a second immunoglobulin light chain variable region that specifically binds to a SARS-CoV-2 protein; VL3 is a third immunoglobulin light chain variable region that specifically binds to a SARS-CoV-2 protein; VL4 is a fourth immunoglobulin light chain variable region that specifically binds to a SARS-CoV-2 protein; VH1 is a first immunoglobulin heavy chain variable region that specifically binds to a SARS-CoV-2 protein; VH2 is a second immunoglobulin heavy chain variable region that specifically binds to a SARS-CoV-2 protein; VH3 is a third immunoglobulin heavy chain variable region that specifically binds to a SARS-CoV-2 protein; VH4 is a fourth immunoglobulin heavy chain variable region that specifically binds to a SARS-CoV-2 protein; Fc is a region comprising an immunoglobulin heavy chain constant region 2 (CH2), an immunoglobulin heavy chain constant region 3 (CH3), and optionally, an immunoglobulin hinge; and L1-L16 are amino acid linkers.

[0096] Also provided herein is an antigen binding polypeptide having a structure represented by VL1-L1-VL2-L2-VH2-L3-VH1-L4-CH1-L5-CL; VL1-L1-VH2-L2-VL2-L3-VH1-L4-CH1-L5-CL; VH1-L6-VH2-L7-VL2-L8-VL1-L9-CH1-L10-CL; VH1-L6-VL2-L7-VH2-L8-VL1-L9-CH1-L10-CL; VL1-L11-VL2-L12-VH2-L13-VH1-L14-CL-L15-CH1; VL1-L11-VH2-L12-VL2-L13-VH1-L14-CL-L15-CH1; VH1-L16-VH2-L17-VL2-L18-VL1-L19-CL-L20-CH1; or VH1-L16-VL2-L17-VH2-L18-VL1-L19-CL-L20-CH1; wherein VL1 is a first immunoglobulin light chain variable region that specifically binds to a SARS-CoV-2 protein; VL2 is a second immunoglobulin light chain variable region that specifically binds to a SARS-CoV-2 protein; VH1 is a first immunoglobulin heavy chain variable region that specifically binds to a SARS-CoV-2 protein; VH2 is a second immunoglobulin heavy chain variable region that specifically binds to a SARS-CoV-2 protein; CH1 is an immunoglobulin heavy chain constant region 1; CL is an immunoglobulin light chain constant region; and L1-L20 are amino acid linkers.

[0097] Also provided herein is an antigen binding polypeptide having a structure represented by VL1-L1-VL2-L2-VH2-L3-VH1-L4-CH1-L5-CL; VH1-L6-VH2-L7-VL2-L8-VL1-L9-CH1-L10-CL; VL1-L11-VL2-L12-VH2-L13-VH1-L14-CL-L15-CH1; or VH1-L16-VH2-L17-VL2-L18-VL1-L19-CL-L20-CH1; wherein VL1 is a first immunoglobulin light chain variable region that specifically binds to a SARS-CoV-2 protein; VL2 is a second immunoglobulin light chain variable region that specifically binds to a SARS-CoV-2 protein; VH1 is a first immunoglobulin heavy chain variable region that specifically binds to a SARS-CoV-2 protein; VH2 is a second immunoglobulin heavy chain variable region that specifically binds to a SARS-CoV-2 protein; CH1 is an immunoglobulin heavy chain constant region 1; CL is an immunoglobulin light chain constant region; and L1-L20 are amino acid linkers.

[0098] Also provided herein is an antigen binding polypeptide having a structure represented by VL1-L1-VH2-L2-VL2-L3-VH1-L4-CH1-L5-CL; VH1-L6-VL2-L7-VH2-L8-VL1-L9-CH1-L10-CL; VL1-L11-VH2-L12-VL2-L13-VH1-L14-CL-L15-CH1; or VH1-L16-VL2-L17-VH2-L18-VL1-L19-CL-L20-CH1; wherein VL1 is a first immunoglobulin light chain variable region that specifically binds to a SARS-CoV-2 protein; VL2 is a second immunoglobulin light chain variable region that specifically binds to a SARS-CoV-2 protein; VH1 is a first immunoglobulin heavy chain variable region that specifically binds to a SARS-CoV-2 protein; VH2 is a second immunoglobulin heavy chain variable region that specifically binds to a SARS-CoV-2 protein; CH1 is an immunoglobulin heavy chain constant region 1; CL is an immunoglobulin light chain constant region; and L1-L20 are amino acid linkers.

[0099] Also provided herein is an antigen binding polypeptide complex comprising a first polypeptide and a second polypeptide; wherein the first polypeptide has a structure represented by VL1-L1-VL2-L2-VH2-L3-VH1-L4-CH1-L5-CL; VL1-L1-VH2-L2-VL2-L3-VH1-L4-CH1-L5-CL; VH1-L6-VH2-L7-VL2-L8-VL1-L9-CH1-L10-CL; VH1-L6-VL2-L7-VH2-L8-VL1-L9-CH1-L10-CL; VL1-L11-VL2-L12-VH2-L13-VH1-L14-CL-L15-CH1; VL1-L11-VH2-L12-VL2-L13-VH1-L14-CL-L15-CH1; VH1-L16-VH2-L17-VL2-L18-VL1-L19-CL-L20-CH1; or VH1-L16-VL2-L17-VH2-L18-VL1-L19-CL-L20-CH1; wherein the second polypeptide has a structure represented by VL3-L21-VL4-L22-VH4-L23-VH3-L24-CH1-L25-CL; VL3-L21-VH4-L22-VL4-L23-VH3-L24-CH1-L25-CL; VH3-L26-VH4-L27-VL4-L28-VL3-L29-CH1-L30-CL; VH3-L26-VL4-L27-VH4-L28-VL3-L29-CH1-L30-CL; VL3-L31-VL4-L32-VH4-L33-VH3-L34-CL-L35-CH1; VL3-L31-VH4-L32-VL4-L33-VH3-L34-CL-L35-CH1; VH3-L36-VH4-L37-VL4-L38-VL3-L39-CL-L40-CH1; or VH3-L36-VL4-L37-VH4-L38-VL3-L39-CL-L40-CH1; wherein VL1 is a first immunoglobulin light chain variable region that specifically binds to a SARS-CoV-2 protein; VL2 is a second immunoglobulin light chain variable region that specifically binds to a SARS-CoV-2 protein; VL3 is a third immunoglobulin light chain variable region that specifically binds to a SARS-CoV-2 protein; VL4 is a fourth immunoglobulin light chain variable region that specifically binds to a SARS-CoV-2 protein; VH1 is a first immunoglobulin heavy chain variable region that specifically binds to a SARS-CoV-2 protein; VH2 is a second immunoglobulin heavy chain variable region that specifically binds to a SARS-CoV-2 protein; VH3 is a third immunoglobulin heavy chain variable region that specifically binds to a SARS-CoV-2 protein; VH4 is a fourth immunoglobulin heavy chain variable region that specifically binds to a SARS-CoV-2 protein; CH1 is an immunoglobulin heavy chain constant region 1; CL is an immunoglobulin light chain constant region; and L1-L40 are amino acid linkers.

[0100] Also provided herein is an antigen binding polypeptide complex comprising a first polypeptide and a second polypeptide; wherein the first polypeptide has a structure represented by VL1-L1-VL2-L2-VH2-L3-VH1-L4-CH1-L5-CL; VH1-L6-VH2-L7-VL2-L8-VL1-L9-CH1-L10-CL; VL1-L11-VL2-L12-VH2-L13-VH1-L14-CL-L15-CH1; or VH1-L16-VH2-L17-VL2-L18-VL1-L19-CL-L20-CH1; wherein the second polypeptide has a structure represented by VL3-L21-VL4-L22-VH4-L23-VH3-L24-CH1-L25-CL; VH3-L26-VH4-L27-VL4-L28-VL3-L29-CH1-L30-CL; VL3-L31-VL4-L32-VH4-L33-VH3-L34-CL-L35-CH1; or VH3-L36-VH4-L37-VL4-L38-VL3-L39-CL-L40-CH1; wherein VL1 is a first immunoglobulin light chain variable region that specifically binds to a SARS-CoV-2 protein; VL2 is a second immunoglobulin light chain variable region that specifically binds to a SARS-CoV-2 protein; VL3 is a third immunoglobulin light chain variable region that specifically binds to a SARS-CoV-2 protein; VL4 is a fourth immunoglobulin light chain variable region that specifically binds to a SARS-CoV-2 protein; VH1 is a first immunoglobulin heavy chain variable region that specifically binds to a SARS-CoV-2 protein; VH2 is a second immunoglobulin heavy chain variable region that specifically binds to a SARS-CoV-2 protein; VH3 is a third immunoglobulin heavy chain variable region that specifically binds to a SARS-CoV-2 protein; VH4 is a fourth immunoglobulin heavy chain variable region that specifically binds to a SARS-CoV-2 protein; CH1 is an immunoglobulin heavy chain constant region 1; CL is an immunoglobulin light chain constant region; and L1-L40 are amino acid linkers.

[0101] Also provided herein is an antigen binding polypeptide complex comprising a first polypeptide and a second polypeptide; wherein the first polypeptide has a structure represented by VL1-L1-VH2-L2-VL2-L3-VH1-L4-CH1-L5-CL; VH1-L6-VL2-L7-VH2-L8-VL1-L9-CH1-L10-CL; VL1-L11-VH2-L12-VL2-L13-VH1-L14-CL-L15-CH1; or VH1-L16-VL2-L17-VH2-L18-VL1-L19-CL-L20-CH1; wherein the second polypeptide has a structure represented by VL3-L21-VH4-L22-VL4-L23-VH3-L24-CH1-L25-CL; VH3-L26-VL4-L27-VH4-L28-VL3-L29-CH1-L30-CL; VL3-L31-VH4-L32-VL4-L33-VH3-L34-CL-L35-CH1; or VH3-L36-VL4-L37-VH4-L38-VL3-L39-CL-L40-CH1; wherein VL1 is a first immunoglobulin light chain variable region that specifically binds to a SARS-CoV-2 protein; VL2 is a second immunoglobulin light chain variable region that specifically binds to a SARS-CoV-2 protein; VL3 is a third immunoglobulin light chain variable region that specifically binds to a SARS-CoV-2 protein; VL4 is a fourth immunoglobulin light chain variable region that specifically binds to a SARS-CoV-2 protein; VH1 is a first immunoglobulin heavy chain variable region that specifically binds to a SARS-CoV-2 protein; VH2 is a second immunoglobulin heavy chain variable region that specifically binds to a SARS-CoV-2 protein; VH3 is a third immunoglobulin heavy chain variable region that specifically binds to a SARS-CoV-2 protein; VH4 is a fourth immunoglobulin heavy chain variable region that specifically binds to a SARS-CoV-2 protein; CH1 is an immunoglobulin heavy chain constant region 1; CL is an immunoglobulin light chain constant region; and L1-L40 are amino acid linkers.

[0102] Also provided herein is an antigen binding polypeptide having a structure represented by VL1-L1-VL2-L2-VH2-L3-VH1-L4-CH1-L5-CL-L6-Fc; VL1-L1-VH2-L2-VL2-L3-VH1-L4-CH1-L5-CL-L6-Fc; VH1-L7-VH2-L8-VL2-L9-VL1-L10-CH1-L11-CL-L12-Fc; VH1-L7-VL2-L8-VH2-L9-VL1-L10-CH1-L11-CL-L12-Fc; VL1-L13-VL2-L14-VH2-L15-VH1-L16-CL-L17-CH1-L18-Fc; VL1-L13-VH2-L14-VL2-L15-VH1-L16-CL-L17-CH1-L18-Fc; VH1-L19-VH2-L20-VL2-L21-VL1-L22-CL-L23-CH1-L24-Fc; or VH1-L19-VL2-L20-VH2-L21-VL1-L22-CL-L23-CH1-L24-Fc; wherein VL1 is a first immunoglobulin light chain variable region that specifically binds to a SARS-CoV-2 protein; VL2 is a second immunoglobulin light chain variable region that specifically binds to a SARS-CoV-2 protein; VH1 is a first immunoglobulin heavy chain variable region that specifically binds to a SARS-CoV-2 protein; VH2 is a second immunoglobulin heavy chain variable region that specifically binds to a SARS-CoV-2 protein; CH1 is an immunoglobulin heavy chain constant region 1; CL is an immunoglobulin light chain constant region; Fc is a region comprising an immunoglobulin heavy chain constant region 2 (CH2), an immunoglobulin heavy chain constant region 3 (CH3), and optionally, an immunoglobulin hinge; and L1-L24 are amino acid linkers.

[0103] Also provided herein is an antigen binding polypeptide having a structure represented by VL1-L1-VL2-L2-VH2-L3-VH1-L4-CH1-L5-CL-L6-Fc; VH1-L7-VH2-L8-VL2-L9-VL1-L10-CH1-L11-CL-L12-Fc; VL1-L13-VL2-L14-VH2-L15-VH1-L16-CL-L17-CH1-L18-Fc; or VH1-L19-VH2-L20-VL2-L21-VL1-L22-CL-L23-CH1-L24-Fc; wherein VL1 is a first immunoglobulin light chain variable region that specifically binds to a SARS-CoV-2 protein; VL2 is a second immunoglobulin light chain variable region that specifically binds to a SARS-CoV-2 protein; VH1 is a first immunoglobulin heavy chain variable region that specifically binds to a SARS-CoV-2 protein; VH2 is a second immunoglobulin heavy chain variable region that specifically binds to a SARS-CoV-2 protein; CH1 is an immunoglobulin heavy chain constant region 1; CL is an immunoglobulin light chain constant region; Fc is a region comprising an immunoglobulin heavy chain constant region 2 (CH2), an immunoglobulin heavy chain constant region 3 (CH3), and optionally, an immunoglobulin hinge; and L1-L24 are amino acid linkers.

[0104] Also provided herein is an antigen binding polypeptide having a structure represented by VL1-L1-VH2-L2-VL2-L3-VH1-L4-CH1-L5-CL-L6-Fc; VH1-L7-VL2-L8-VH2-L9-VL1-L10-CH1-L11-CL-L12-Fc; VL1-L13-VH2-L14-VL2-L15-VH1-L16-CL-L17-CH1-L18-Fc; or VH1-L19-VH2-L20-VL2-L21-VL1-L22-CL-L23-CH1-L24-Fc; wherein VL1 is a first immunoglobulin light chain variable region that specifically binds to a SARS-CoV-2 protein; VL2 is a second immunoglobulin light chain variable region that specifically binds to a SARS-CoV-2 protein; VH1 is a first immunoglobulin heavy chain variable region that specifically binds to a SARS-CoV-2 protein; VH2 is a second immunoglobulin heavy chain variable region that specifically binds to a SARS-CoV-2 protein; CH1 is an immunoglobulin heavy chain constant region 1; CL is an immunoglobulin light chain constant region; Fc is a region comprising an immunoglobulin heavy chain constant region 2 (CH2), an immunoglobulin heavy chain constant region 3 (CH3), and optionally, an immunoglobulin hinge; and L1-L24 are amino acid linkers.

[0105] Also provided herein is an antigen binding polypeptide complex comprising a first polypeptide and a second polypeptide; wherein the first polypeptide has a structure represented by VL1-L1-VL2-L2-VH2-L3-VH1-L4-CH1-L5-CL-L6-Fc; VL1-L1-VH2-L2-VL2-L3-VH1-L4-CH1-L5-CL-L6-Fc; VH1-L7-VH2-L8-VL2-L9-VL1-L10-CH1-L11-CL-L12-Fc; VH1-L7-VL2-L8-VH2-L9-VL1-L10-CH1-L11-CL-L12-Fc; VL1-L13-VL2-L14-VH2-L15-VH1-L16-CL-L17-CH1-L18-Fc; VL1-L13-VH2-L14-VL2-L15-VH1-L16-CL-L17-CH1-L18-Fc; VH1-L19-VH2-L20-VL2-L21-VL1-L22-CL-L23-CH1-L24-Fc; or VH1-L19-VL2-L20-VH2-L21-VL1-L22-CL-L23-CH1-L24-Fc; wherein the second polypeptide has a structure represented by Fc; VL3-L25-VL4-L26-VH4-L27-VH3-L28-CH1-L29-CL-L30-Fc; VL3-L25-VH4-L26-VL4-L27-VH3-L28-CH1-L29-CL-L30-Fc; VH3-L31-VH4-L32-VL4-L33-VL3-L34-CH1-L35-CL-L36-Fc; VH3-L31-VL4-L32-VH4-L33-VL3-L34-CH1-L35-CL-L36-Fc; VL3-L37-VL4-L38-VH4-L39-VH3-L40-CL-L41-CH1-L42-Fc; VL3-L37-VH4-L38-VL4-L39-VH3-L40-CL-L41-CH1-L42-Fc; VH3-L43-VH4-L44-VL4-L45-VL3-L46-CL-L47-CH1-L48-Fc; or VH3-L43-VL4-L44-VH4-L45-VL3-L46-CL-L47-CH1-L48-Fc; wherein VL1 is a first immunoglobulin light chain variable region that specifically binds to a SARS-CoV-2 protein; VL2 is a second immunoglobulin light chain variable region that specifically binds to a SARS-CoV-2 protein; VL3 is a third immunoglobulin light chain variable region that specifically binds to a SARS-CoV-2 protein; VL4 is a fourth immunoglobulin light chain variable region that specifically binds to a SARS-CoV-2 protein; VH1 is a first immunoglobulin heavy chain variable region that specifically binds to a SARS-CoV-2 protein; VH2 is a second immunoglobulin heavy chain variable region that specifically binds to a SARS-CoV-2 protein; VH3 is a third immunoglobulin heavy chain variable region that specifically binds to a SARS-CoV-2 protein; VH4 is a fourth immunoglobulin heavy chain variable region that specifically binds to a SARS-CoV-2 protein; CH1 is an immunoglobulin heavy chain constant region 1; CL is an immunoglobulin light chain constant region; Fc is a region comprising an immunoglobulin heavy chain constant region 2 (CH2), an immunoglobulin heavy chain constant region 3 (CH3), and optionally, an immunoglobulin hinge; and L1-L48 are amino acid linkers.

[0106] Also provided herein is an antigen binding polypeptide complex comprising a first polypeptide and a second polypeptide; wherein the first polypeptide has a structure represented by VL1-L1-VL2-L2-VH2-L3-VH1-L4-CH1-L5-CL-L6-Fc; VH1-L7-VH2-L8-VL2-L9-VL1-L10-CH1-L11-CL-L12-Fc; VL1-L13-VL2-L14-VH2-L15-VH1-L16-CL-L17-CH1-L18-Fc; or VH1-L19-VH2-L20-VL2-L21-VL1-L22-CL-L23-CH1-L24-Fc; wherein the second polypeptide has a structure represented by Fc; VL3-L25-VL4-L26-VH4-L27-VH3-L28-CH1-L29-CL-L30-Fc; VH3-L31-VH4-L32-VL4-L33-VL3-L34-CH1-L35-CL-L36-Fc; VL3-L37-VL4-L38-VH4-L39-VH3-L40-CL-L41-CH1-L42-Fc; or VH3-L43-VH4-L44-VL4-L45-VL3-L46-CL-L47-CH1-L48-Fc; wherein VL1 is a first immunoglobulin light chain variable region that specifically binds to a SARS-CoV-2 protein; VL2 is a second immunoglobulin light chain variable region that specifically binds to a SARS-CoV-2 protein; VL3 is a third immunoglobulin light chain variable region that specifically binds to a SARS-CoV-2 protein; VL4 is a fourth immunoglobulin light chain variable region that specifically binds to a SARS-CoV-2 protein; VH1 is a first immunoglobulin heavy chain variable region that specifically binds to a SARS-CoV-2 protein; VH2 is a second immunoglobulin heavy chain variable region that specifically binds to a SARS-CoV-2 protein; VH3 is a third immunoglobulin heavy chain variable region that specifically binds to a SARS-CoV-2 protein; VH4 is a fourth immunoglobulin heavy chain variable region that specifically binds to a SARS-CoV-2 protein; CH1 is an immunoglobulin heavy chain constant region 1; CL is an immunoglobulin light chain constant region; Fc is a region comprising an immunoglobulin heavy chain constant region 2 (CH2), an immunoglobulin heavy chain constant region 3 (CH3), and optionally, an immunoglobulin hinge; and L1-L48 are amino acid linkers.

[0107] Also provided herein is an antigen binding polypeptide complex comprising a first polypeptide and a second polypeptide; wherein the first polypeptide has a structure represented by VL1-L1-VH2-L2-VL2-L3-VH1-L4-CH1-L5-CL-L6-Fc; VH1-L7-VL2-L8-VH2-L9-VL1-L10-CH1-L11-CL-L12-Fc; VL1-L13-VH2-L14-VL2-L15-VH1-L16-CL-L17-CH1-L18-Fc; or VH1-L19-VL2-L20-VH2-L21-VL1-L22-CL-L23-CH1-L24-Fc; wherein the second polypeptide has a structure represented by Fc; VL3-L25-VH4-L26-VL4-L27-VH3-L28-CH1-L29-CL-L30-Fc; VH3-L31-VL4-L32-VH4-L33-VL3-L34-CH1-L35-CL-L36-Fc; VL3-L37-VH4-L38-VL4-L39-VH3-L40-CL-L41-CH1-L42-Fc; or VH3-L43-VL4-L44-VH4-L45-VL3-L46-CL-L47-CH1-L48-Fc; wherein VL1 is a first immunoglobulin light chain variable region that specifically binds to a SARS-CoV-2 protein; VL2 is a second immunoglobulin light chain variable region that specifically binds to a SARS-CoV-2 protein; VL3 is a third immunoglobulin light chain variable region that specifically binds to a SARS-CoV-2 protein; VL4 is a fourth immunoglobulin light chain variable region that specifically binds to a SARS-CoV-2 protein; VH1 is a first immunoglobulin heavy chain variable region that specifically binds to a SARS-CoV-2 protein; VH2 is a second immunoglobulin heavy chain variable region that specifically binds to a SARS-CoV-2 protein; VH3 is a third immunoglobulin heavy chain variable region that specifically binds to a SARS-CoV-2 protein; VH4 is a fourth immunoglobulin heavy chain variable region that specifically binds to a SARS-CoV-2 protein; CH1 is an immunoglobulin heavy chain constant region 1; CL is an immunoglobulin light chain constant region; Fc is a region comprising an immunoglobulin heavy chain constant region 2 (CH2), an immunoglobulin heavy chain constant region 3 (CH3), and optionally, an immunoglobulin hinge; and L1-L48 are amino acid linkers.

[0108] Also provided herein is an antigen binding polypeptide or antigen binding polypeptide complex comprising a polypeptide having a structure represented by VL1-L1-VL2-L2-VH2-L3-VH1-L4-Fc-L5-Fc; VL1-L1-VH2-L2-VL2-L3-VH1-L4-Fc-L5-Fc; VH1-L6-VH2-L7-VL2-L8-VL1-L9-Fc-L10-Fc; or VH1-L6-VL2-L7-VH2-L8-VL1-L9-Fc-L10-Fc; wherein VL1 is a first immunoglobulin light chain variable region that specifically binds to a SARS-CoV-2 protein; VL2 is a second immunoglobulin light chain variable region that specifically binds a SARS-CoV-2 protein; VH1 is a first immunoglobulin heavy chain variable region that specifically binds to a SARS-CoV-2 protein; VH2 is a second immunoglobulin heavy chain variable region that specifically binds to a SARS-CoV-2 protein; Fc is a region comprising an immunoglobulin heavy chain constant region 2 (CH2), an immunoglobulin heavy chain constant region 3 (CH3), and optionally, an immunoglobulin hinge; and L1-L10 are amino acid linkers.

[0109] Also provided herein is an antigen binding polypeptide or antigen binding polypeptide complex comprising a polypeptide having a structure represented by VL1-L1-VL2-L2-VH2-L3-VH1-L4-Fc-L5-Fc or VH1-L6-VH2-L7-VL2-L8-VL1-L9-Fc-L10-Fc; wherein VL1 is a first immunoglobulin light chain variable region that specifically binds to a SARS-CoV-2 protein; VL2 is a second immunoglobulin light chain variable region that specifically binds a SARS-CoV-2 protein; VH1 is a first immunoglobulin heavy chain variable region that specifically binds to a SARS-CoV-2 protein; VH2 is a second immunoglobulin heavy chain variable region that specifically binds to a SARS-CoV-2 protein; Fc is a region comprising an immunoglobulin heavy chain constant region 2 (CH2), an immunoglobulin heavy chain constant region 3 (CH3), and optionally, an immunoglobulin hinge; and L1-L10 are amino acid linkers.

[0110] Also provided herein is an antigen binding polypeptide or antigen binding polypeptide complex comprising a polypeptide having a structure represented by VL1-L1-VH2-L2-VL2-L3-VH1-L4-Fc-L5-Fc; or VH1-L6-VL2-L7-VH2-L8-VL1-L9-Fc-L10-Fc; wherein VL1 is a first immunoglobulin light chain variable region that specifically binds to a SARS-CoV-2 protein; VL2 is a second immunoglobulin light chain variable region that specifically binds a SARS-CoV-2 protein; VH1 is a first immunoglobulin heavy chain variable region that specifically binds to a SARS-CoV-2 protein; VH2 is a second immunoglobulin heavy chain variable region that specifically binds to a SARS-CoV-2 protein; Fc is a region comprising an immunoglobulin heavy chain constant region 2 (CH2), an immunoglobulin heavy chain constant region 3 (CH3), and optionally, an immunoglobulin hinge; and L1-L10 are amino acid linkers.

[0111] In some aspects, VH1, VH2, VH3 and VH4 each comprise the same heavy chain variable region, and VL1, VL2, VL3 and VL4 each comprise the same light chain variable region.

[0112] In some aspects, VH1 comprises the same heavy chain variable region as VH3, and VL1 comprises the same light chain variable region as VL3.

[0113] In some aspects, VH2 comprises the same heavy chain variable region as VH4, and VL2 comprises the same light chain variable region as VL4.

[0114] In some aspects, two of VH1, VH2, VH3 and VH4 comprise the same heavy chain variable region, and two of VL1, VL2, VL3 and VL4 comprise the same light chain variable region.

[0115] In some aspects, VH2 comprises the same heavy chain variable region as VH4, and VL2 comprises the same light chain variable region as VL4.

[0116] In some aspects, VH2 comprises the same heavy chain variable region as VH3, and VL2 comprises the same light chain variable region as VL3.

[0117] In some aspects, VH1 comprises the same heavy chain variable region as VH4, and VL1 comprises the same light chain variable region as VL4.

[0118] In some aspects, VH1 comprises the same heavy chain variable region as VH3, and VL1 comprises the same light chain variable region as VL3.

[0119] In some aspects, the immunoglobulin hinge comprises an upper hinge region, a middle hinge region, a lower hinge region, or a combination thereof.

[0120] In some aspects, linkers L1-L48 each independently have a length of from 0 amino acids to about 50 amino acids.

[0121] In some aspects, linkers L1-L48 not having a length of 0 amino acids each independently comprise an amino acid sequence having at least 80%, at least 85%, at least 90%, at least 91%, at least 92%, at least 93%, at least 94%, at least 95%, at least 96%, at least 97%, at least 98%, at least 99% or 100% identity to any one of SEQ ID NOs:1-34, wherein SEQ ID NO:1 has the amino acid sequence of G, SEQ ID NO:2 has the amino acid sequence of A, SEQ ID NO:3 has the amino acid sequence of GSS and SEQ ID NO:4 has the amino acid sequence of ASG.

[0122] In some aspects, one or more of linkers L1-L48 are non-immunogenic.

[0123] In some aspects, one or more of linkers L1-L48 do not contain a consensus T cell epitope.

[0124] In some aspects, the Fc region comprises at least one knob-into-hole modification or Fc effector function knockout mutation.

[0125] In some aspects, the antigen binding polypeptide complex is an IgG1 or IgG4 antibody and the knob-into-hole modification comprises (i) knob substitutions of S354C and T366W and hole substitutions of Y349C, T366S, L368A and Y407V; (ii) hole substitutions of M428L and N434S or N434A; (iii) hole substitutions of M252Y, S254T and T256E; or (iv) a combination thereof, based on the EU numbering scheme. In some aspects, the hole substitutions are M428L and N424S, based on the EU numbering scheme. In some aspects, the hole substitution is N434A, based on the EU numbering scheme.

[0126] In some aspects, the antigen binding polypeptide complex is an IgG1 or IgG4 antibody and the Fc effector function knockout mutation is L234A, L235A, P239A or a combination thereof, based on the EU numbering scheme.

[0127] In some aspects, the antigen binding polypeptide or antigen binding polypeptide complex comprises a detectable label. In some aspects, the detectable label is a radioactive label, chemiluminescent label, fluorescent label, enzyme, peptide tag, or a combination thereof. In some aspects, the peptide tag is a polyhistidine tag consisting of from about four to about 10 histidine residues. In some aspects, the polyhistidine tag consists of about eight histidine residues.

[0128] In some aspects, the antigen binding polypeptide or antigen binding polypeptide complex specifically binds to a SARS-CoV-2 protein with an equilibrium dissociation constant (K_{D}) of from about 10 μM to about 1 μM.

[0129] In some aspects, a variable region of an antibody may require site specific deglycosylation. In some aspects, and with respect to E8 VH mAb, an N62 mutation is made to remove a high mannose glycosylate residue or moiety. Preferred mutations include, but are not limited to, N62Q or N62S.

[0130] In some aspects, the antigen binding polypeptide complex is bispecific, trispecific or tetraspecific and has greater neutralization potency against SARS-CoV-2 virus than a monospecific antigen binding polypeptide complex that specifically binds to one of the same antigens the bispecific, trispecific or tetraspecific antigen binding polypeptide complex.

[0131] In some aspects, the antigen binding polypeptide complex is bispecific, trispecific or tetraspecific and has greater neutralization potency against SARS-CoV-2 virus than a mixture of monospecific antigen binding polypeptide complexes that specifically bind to the same antigens as the bispecific, trispecific or tetraspecific antigen binding polypeptide complex.

[0132] In some aspects, the SARS-CoV-2 virus is the original Wuhan strain (WA1), D614G spike protein mutant (D614G), Alpha variant (B.1.1.7), Beta variant (B.1.351), Gamma variant (P.1), Delta variant, Epsilon variant (B.1.427), or Omicron variant (B.1.1.529), or a combination thereof. In some aspects, the Omicron variant is BA.1, BA.2, BA.2.12.1, BA.4, BA.4/5, BA.5, BQ.1, BQ.1.1, BA.2.75, BA.2.75.2, BA.4.6, BQ.1.1, BJ.1, XBB, XBB1.5, BF.7, CH.1.1, or a combination thereof.

[0133] In some aspects, the SARS-CoV-2 protein is a membrane protein, nucleocapsid protein, envelope protein, or spike protein. In some aspects, the SARS-CoV-2 protein is a spike protein.

[0134] Also provided herein is an antibody or antigen binding fragment thereof comprising an antigen binding polypeptide or antigen binding polypeptide complex provided herein.

[0135] In some aspects, the antibody is IgG, IgM, IgE, IgA or IgD. In some aspects, the IgG is IgG1, IgG2, IgG3 or IgG4.

[0136] In some aspects, the antigen binding fragment is a Fab, scFab, Fab′, F(ab′)₂, Fv or scFv.

[0137] In some aspects, the antibody is human or humanized.

[0138] In some aspects, the antibody is a monoclonal antibody, grafted antibody, or chimeric antibody.

[0139] Also provided herein is a pharmaceutical composition comprising an antigen binding polypeptide, antigen binding polypeptide complex, antibody or antigen binding fragment thereof provided herein. In some aspects, the pharmaceutical composition comprises (1) one or more polynucleotides encoding an antigen binding polypeptide or antigen binding polypeptide complex, and (2) a carrier. In some aspects, the pharmaceutical composition comprises (1) one or more polynucleotides encoding an antigen binding polypeptide or antigen binding polypeptide complex (e.g., antibody or antigen binding fragment thereof) provided herein, and (2) a carrier selected from the group consisting of a lipid or a lipid nanoparticle. In some aspects, the one or more polynucleotides encoding an antigen binding polypeptide or antigen binding polypeptide complex is a stabilized polynucleotide resistant to degradation or decomposition in vivo. In some aspects, the stabilized polynucleotide is capped at one end (5′ cap) and has a long polyadenylated (polyA) tail at the other end to form a stabilized mRNA having 5′ and 3′ UTRs. In some aspects, the polyA tail is about 50 bp, about 100 bp, about 120 bp, or about 150 bp. In some aspects, modified nucleosides may be incorporated into the mRNA to increase translation and/or to lower potential immunogenicity.

[0140] Also provided herein is a pharmaceutical composition comprising an antigen binding polypeptide, antigen binding polypeptide complex, antibody, or antigen binding fragment thereof provided herein, and an additional pharmaceutical agent.

[0141] Also provided herein is a kit comprising an antigen binding polypeptide, antigen binding polypeptide complex, antibody or antigen binding fragment thereof, or a pharmaceutical composition provided herein.

[0142] Also provided herein is a method of preventing or treating a SARS-CoV-2 viral infection in a subject in need thereof, comprising administering to the subject a therapeutically effective amount of an antigen binding polypeptide or polypeptide complex provided herein, an antibody or antigen binding fragment thereof provided herein, a pharmaceutical composition provided herein, or a combination thereof. Delivery of the therapeutic antigen binding polypeptide or antigen binding polypeptide complex can be by direct administration of the therapeutic or by an indirect method that is inclusive of a modified mRNA composition that is administered to the patient in need of treatment thereof by a therapeutic antigen binding polypeptide or antigen binding polypeptide complex translated from the modified mRNA that codes for the therapeutic polypeptide or polypeptide complex.

[0143] Also provided herein is a method of preventing or treating coronavirus disease 2019 (COVID-19) in a subject in need thereof, comprising administering to the subject a therapeutically effective amount of an antigen binding polypeptide or polypeptide complex provided herein, an antibody or antigen binding fragment thereof provided herein, a pharmaceutical composition provided herein, or a combination thereof.

[0144] Also provided herein is a method of diagnosing a subject as being infected with a SARS-CoV-2 virus or suspected of being infected with a SARS-CoV-2 virus, comprising (i) contacting a sample obtained from the subject with an antigen binding polypeptide or polypeptide complex provided herein or an antibody or antigen binding fragment thereof provided herein; (ii) detecting the presence or absence of a virus complex which contains the polypeptide, polypeptide complex, antibody or fragment and a SARS-CoV-2 virus, virion or fragment thereof; and (iii) diagnosing the subject as being infected with a SARS-CoV-2 virus or suspected of being infected with a SARS-CoV-2 virus when the presence of the virus complex is detected.

[0145] Also provided herein is a method of diagnosing a subject as not being infected with a SARS-CoV-2 virus or not suspected of being infected with a SARS-CoV-2 virus, comprising (i) contacting a sample obtained from the subject with an antigen binding polypeptide or polypeptide complex provided herein or an antibody or antigen binding fragment thereof provided herein; (ii) detecting the presence or absence of a virus complex which contains the polypeptide, polypeptide complex, antibody or fragment and a SARS-CoV-2 virus, virion or fragment thereof, and (iii) diagnosing the subject as not being infected with a SARS-CoV-2 virus or not suspected of being infected with a SARS-CoV-2 virus when the presence of the virus complex is not detected.

[0146] Also provided herein is a method of diagnosing a subject as having COVID-19 or suspected of having COVID-19, comprising (i) contacting a sample obtained from the subject with an antigen binding polypeptide or polypeptide complex provided herein or an antibody or antigen binding fragment thereof provided herein; (ii) detecting the presence or absence of a virus complex which contains the polypeptide, polypeptide complex, antibody or fragment and a SARS-CoV-2 virus, virion or fragment thereof, and (iii) diagnosing the subject as having COVID-19 or suspected of having COVID-19 when the presence of the virus complex is detected.

[0147] Also provided herein is a method of diagnosing a subject as not having COVID-19 or not suspected of having COVID-19, comprising (i) contacting a sample obtained from the subject with an antigen binding polypeptide or polypeptide complex provided herein or an antibody or antigen binding fragment thereof provided herein; (ii) detecting the presence or absence of a virus complex which contains the polypeptide, polypeptide complex, antibody or fragment and a SARS-CoV-2 virus, virion or fragment thereof, and (iii) diagnosing the subject as not having COVID-19 or not suspected of having COVID-19 when the presence of the virus complex is not detected.

[0148] In some aspects, the sample is a nasal swab, tissue sample, saliva, plasma or blood.

[0149] In some aspects, detecting the presence or absence of the virus complex comprises an enzyme linked immunosorbent assay (ELISA), immunospot assay, lateral flow assay, flow cytometry, immunohistochemistry or western blot.

[0150] In some aspects, the polypeptide, polypeptide complex, antibody or fragment is bispecific, trispecific or tetraspecific and has greater neutralization potency against SARS-CoV-2 virus than a monospecific polypeptide, polypeptide complex, antibody or fragment that specifically binds to one of the same antigens the bispecific, trispecific or tetraspecific polypeptide, polypeptide complex, antibody or fragment.

[0151] In some aspects, the polypeptide, polypeptide complex, antibody or fragment is bispecific, trispecific or tetraspecific and has greater neutralization potency against SARS-CoV-2 virus than a mixture of monospecific polypeptides, polypeptide complexes, antibodies or fragments that specifically bind to the same antigens as the bispecific, trispecific or tetraspecific polypeptide, polypeptide complex, antibody or fragment.

[0152] In some aspects, the SARS-CoV-2 virus is the original Wuhan strain (WA1), D614G spike protein mutant (D614G), Alpha variant (B.1.1.7), Beta variant (B.1.351), Gamma variant (P.1), Delta variant, Epsilon variant (B.1.427), Omicron variant (B.1.1.529), or a combination thereof. In some aspects, the Omicron variant is BA.1, BA.2, BA.2.12.1, BA.4, BA.4/5, BA.5, BQ.1, BQ.1.1, BA.2.75, BA.2.75.2, BA.4.6, BQ.1.1, BJ.1, XBB, XBB1.5, BF.7, CH.1.1, or a combination thereof.

[0153] Also provided herein is a method of preventing immune escape of a SARS-CoV2 virus in a subject infected with the SARS-CoV2 virus, comprising administering to the subject an effective amount of an antigen binding polypeptide or polypeptide complex provided herein, an antibody or antigen binding fragment thereof provided herein, a pharmaceutical composition provided herein, or a combination thereof.

[0154] Also provided herein is a method of preventing immune escape of a SARS-CoV2 virus in a subject infected with the SARS-CoV2 virus, comprising administering to the subject an effective amount of an anti-SARS-CoV2 multivalent antibody that exhibits improved prevention of immune escape compared to (i) a monovalent anti-SARS-CoV2 antibody that binds to one of the same antigens as the anti-SARS-CoV2 multivalent antibody, and/or (ii) a combination of monovalent anti-SARS-CoV2 antibodies that binds to the same antigens as the anti-SARS-CoV2 multivalent antibody.

[0155] Also provided herein is a method of neutralizing a SARS-CoV-2 virus in a subject infected with the SARS-CoV2 virus, comprising administering to the subject an effective amount of an antigen binding polypeptide or polypeptide complex provided herein, an antibody or antigen binding fragment thereof provided herein, or a combination thereof.

[0156] Also provided herein is a method of increasing neutralization potency against a SARS-CoV-2 virus in a subject infected with the SARS-CoV2 virus, comprising administering to the subject an effective amount of an antigen binding polypeptide or polypeptide complex provided herein, an antibody or antigen binding fragment thereof provided herein, or a combination thereof.

[0157] Also provided herein is a method of increasing neutralization potency against a SARS-CoV-2 virus in a subject infected with the SARS-CoV2 virus, comprising administering to the subject an effective amount of an anti-SARS-CoV2 multivalent antibody that exhibits increased neutralization potency compared to (i) a monovalent anti-SARS-CoV2 antibody that binds to one of the same antigens as the anti-SARS-CoV2 multivalent antibody and/or (ii) a combination of monovalent anti-SARS-CoV2 antibodies that binds to the same antigens as the anti-SARS-CoV2 multivalent antibody.

[0158] Also provided herein is an anti-SARS-CoV2 multivalent antibody that exhibits improved prevention of immune escape compared to (i) a monovalent anti-SARS-CoV2 antibody that binds to one of the same antigens as the anti-SARS-CoV2 multivalent antibody, and/or (ii) a combination of monovalent anti-SARS-CoV2 antibodies that binds to the same antigens as the anti-SARS-CoV2 multivalent antibody.

### BRIEF DESCRIPTION OF THE DRAWINGS

[0159] Some aspects of the invention are herein described, by way of example only, with reference to the accompanying drawings. With specific reference now to the drawings in detail, it is stressed that the particulars shown are by way of example and for purposes of illustrative discussion of aspects of the invention.

[0160] FIG. 1A-1D shows configurations of exemplary monospecific, tetravalent molecules described in the Examples. FIG. 1A: monospecific, tetravalent molecule containing VH and VL of the anti-SARS-CoV-2 antibody, B1-182, with Fc region (MX241). FIG. 1B: monospecific, tetravalent molecule containing VH and VL of B1-182, with Fc, CL and CH1 (MX365). FIG. 1C: monospecific, tetravalent molecule containing VH and VL of the anti-SARS-CoV-2 hybrid antibody, A23-58H/B1-182L, with Fc (MX409). FIG. 1D: monospecific, tetravalent molecule containing VH and VL of A23-58H/B1-182L, with Fc, CL and CH1 (MX466).

[0161] FIG. 2A-2P shows configurations of exemplary bispecific, tetravalent molecules described in the Examples. FIG. 2A: bispecific, tetravalent molecule containing VH and VL of B1-182 and VH and VL of the anti-SARS-CoV-2 antibody, A19-46, with Fc (MX179). FIG. 2B: bispecific, tetravalent molecule containing VH and VL of B1-182 and VH and VL of A19-46, with Fc (MX180). FIG. 2C: bispecific, tetravalent molecule containing VH and VL of B1-182 and VH and VL of the anti-SARS-CoV-2 antibody, A19-61, with Fc (MX183). FIG. 2D: bispecific, tetravalent molecule containing VH and VL of B1-182 and VH and VL of A19-61, with Fc (MX184). FIG. 2E: bispecific, tetravalent molecule containing VH and VL of B1-182 and VH and VL of A19-61, with Fc, CL and CH1 (MX366). FIG. 2F: bispecific, tetravalent molecule containing VH and VL of B1-182 and VH and VL of A19-61, with Fc, CL and CH1 (MX367). FIG. 2G: bispecific, tetravalent molecule containing VH and VL of A23-58H/B1-182L and VH and VL of A19-61, with Fc (MX412). FIG. 2H: bispecific, tetravalent molecule containing VH and VL of A23-58H/B1-182L and VH and VL of A19-61, with Fc (MX413). FIG. 2I: bispecific, tetravalent molecule containing VH and VL of A23-58H/B1-182L and VH and VL of A19-46, with Fc (MX490). FIG. 2J: bispecific, tetravalent molecule containing VH and VL of A23-58H/B1-182L and VH and VL of A19-46, with Fc (MX492). FIG. 2K: bispecific, tetravalent molecule containing VH and VL of A23-58H/B1-182L and VH and VL of A19-61, with Fc, CL and CH1 (MX467). FIG. 2L: bispecific, tetravalent molecule containing VH and VL of A23-58H/B1-182L and VH and VL of A19-61, with Fc, CL and CH1 (MX468). FIG. 2M: bispecific, tetravalent molecule containing VH and VL of A23-58H/B1-182L and VH and VL of A19-46, with Fc, CL and CH1 (MX491). FIG. 2N: bispecific, tetravalent molecule containing VH and VL of A23-58H/B1-182L and VH and VL of A19-46, with Fc, CL and CH1 (MX493). FIG. 2O: bispecific, tetravalent molecule containing VH and VL of the anti-SARS-CoV-2 antibody, A23-58, and VH and VL of A19-61 (MX326). FIG. 2P: bispecific, tetravalent molecule containing VH and VL of A23-58 and VH and VL of A19-61 (MX327).

[0162] FIG. 3A-3H shows exemplary configurations of trispecific, tetravalent molecules described in the Examples. FIG. 3A: trispecific, tetravalent molecule containing VH and VL of A19-46, VH and VL of A19-61, and VH and VL of B1-182 with Fc and knob-into-hole modification (MX494). FIG. 3B: trispecific, tetravalent molecule containing VH and VL of A19-46, VH and VL of A19-61, and VH and VL of B1-182 with Fc and knob-into-hole modification (MX495). FIG. 3C: trispecific, tetravalent molecule containing VH and VL of A19-46, VH and VL of A19-61, and VH and VL of B1-182 with Fc and knob-into-hole modification (MX496). FIG. 3D: trispecific, tetravalent molecule containing VH and VL of A19-46, VH and VL of A19-61, and VH and VL of B1-182 with Fc and knob-into-hole modification (MX497). FIG. 3E: trispecific, tetravalent molecule containing VH and VL of A19-46, VH and VL of A19-61, and VH and VL of A23-58H/B1-182L with Fc and knob-into-hole modification (MX498). FIG. 3F: trispecific, tetravalent molecule containing VH and VL of A19-46, VH and VL of A19-61, and VH and VL of A23-58H/B1-182L with Fc and knob-into-hole modification (MX499). FIG. 3G: trispecific, tetravalent molecule containing VH and VL of A19-46, VH and VL of A19-61, and VH and VL of A23-58H/B1-182L with Fc and knob-into-hole modification (MX500). FIG. 3H: trispecific, tetravalent molecule containing VH and VL of A19-46, VH and VL of A19-61, and VH and VL of A23-58H/B1-182L with Fc and knob-into-hole modification (MX501).

[0163] FIG. 4 shows the percent neutralization of Omicron variant (B.1.1.529) in the presence of increasing concentration of MX179 and MX180 antibodies described in Example 1, along with B1-182 and A19-46 parental antibodies.

[0164] FIG. 5 shows the percent neutralization of Omicron variant (B.1.1.529) in the presence of increasing concentration of MX179 or MX180 antibodies described in Example 1, in comparison to the combination of B1-182 and A19-46 parental antibodies. Concentration of each antibody in the combination of two antibody mixture was plotted.

[0165] FIG. 6 shows the percent neutralization of Omicron variant (B.1.1.529) in the presence of increasing concentration of MX494, MX495, MX496 or MX497 antibodies described in Example 1, in comparison to the combination of B1-182, A19-46 and A19-61 parental antibodies. Concentration of each antibody in the combination of three antibody mixture was plotted.

[0166] FIG. 7 shows serum antibody levels in Tg32-humanized FcRn mice (n=5) treated with parental or tetravalent bispecific MX413 (A19-61×A23-58H/B1-182L) antibody. Concentrations of VRC01 LS (dashed line, circle symbol), B1-182.1 (dotted line, square symbol), and MX413 (solid line, triangle symbol) antibodies containing a Fc mutation to extend half-life were measured in serum over the course of 35 days after intravenous administration of a single 5 mg/kg dose of each antibody. Each data point represents the mean±standard error of the mean (SEM) determined in triplicates.

[0167] FIG. 8A shows a diagram of the in vivo passive transfer challenge study described in Example 4.

[0168] FIGS. 8B-8D show the results from BA.1 challenge. FIG. 8B shows the weight loss of animals. Symbols and error bars represent means and SEM, respectively. FIG. 8C shows the lung viral load of animals. FIG. 8D shows the nares viral load of animals. Each symbol represents an individual animal and may overlap for equivalent values. An unpaired, two-tailed student t-test was used to determine significance at each timepoint between treated and untreated animals. Significant p-values are indicated as: * (≤0.05), † (≤0.01), ‡ (≤0.001), and ¥ (0.0001). Boxes and horizontal bars denote the infected subjects median (IQR) and medians, respectively. Whisker end points are equal to the maximum and minimum values. Dotted lines indicate the assay's lower limit of detection. An unpaired, two-tailed student t-test was used to determine significance at each timepoint between treated and untreated animals. Significant p-values are indicated on graphs.

[0169] FIGS. 8E-8G show the results from BA.2 challenge. FIG. 8E shows weight loss of animals. Symbols and error bars represent means and SEM, respectively. FIG. 8F shows the lung viral load of animals. FIG. 8G shows the nares viral load of animals. Each symbol represents an individual animal and may overlap for equivalent values. An unpaired, two-tailed student t-test was used to determine significance at each timepoint between treated and untreated animals. Significant p-values are indicated as: * (≤0.05), † (≤0.01), ‡ (≤0.001), and ¥ (≤0.0001). Boxes and horizontal bars denote the IQR and medians, respectively. Whisker end points are equal to the maximum and minimum values. Dotted lines indicate the assay's lower limit of detection. An unpaired, two-tailed student t-test was used to determine significance at each timepoint between treated and untreated animals. Significant p-values are indicated on graphs.

[0170] FIGS. 8H-8J show the results from BA.5 challenge. FIG. 8H shows weight loss of animals. Symbols and error bars represent means and SEM, respectively. FIG. 8I shows the lung viral load of animals. FIG. 8J shows the nares viral load of animals. Each symbol represents an individual animal and may overlap for equivalent values. An unpaired, two-tailed student t-test was used to determine significance at each timepoint between treated and untreated animals. Significant p-values are indicated as: * (≤0.05), † (≤0.01), ‡ (≤0.001), and ¥ (≤0.0001). Boxes and horizontal bars denote the IQR and medians, respectively. Whisker end points are equal to the maximum and minimum values. Dotted lines indicate the assay's lower limit of detection. An unpaired, two-tailed student t-test was used to determine significance at each timepoint between treated and untreated animals. Significant p-values are indicated on graphs.

[0171] FIG. 9 shows two configurations of trispecific, trivalent cross-over dual variable (CODV) antibodies made utilizing variable fragments (Fv) from B1-182.1 (“182.1”, dotted; light chain=lighter shading; heavy chain=darker shading), the anti-SARS-CoV-2 antibody, A19-46.1 (“46.1”, striped; light chain=lighter shading; heavy chain=darker shading) and A19-61.1 (“61.1”, grid; light chain=lighter shading; heavy chain=darker shading). CH1, CL and Fc regions are also indicated, along with a knob-into-hole modification in the Fc region.

[0172] FIG. 10 shows SARS-CoV-2 escape potential by monospecific antibodies (B1-182.1), a combination of monospecific antibodies (B1-182.1+A19-61.1+A19-46.1), and multispecific antibodies (46.1/61.1-182.1 and 61.1/46.1-182.1). Shown for each antibody is the maximum concentration with >20% cytopathic effect (CPE) that was passaged forward in each round of selection.

[0173] FIG. 11 shows exemplary configurations of tetravalent, bispecific and tetravalent, trispecific molecules. MX828 contains two VH/VL pairs of A19-46 and two VH/VL pairs of A23-58H/A23-58L93VGLTG. MX829 contains two VH/VL pairs of A19-61 and two VH/VL pairs of A23-58H/A23-58L93VGLTG. MX830 contains two VH/VL pairs of A19-46 and two VH/VL pairs of A23-58H/A23-58L94GLTG. MX831 contains two VH/VL pairs of A19-61 and two VH/VL pairs of A23-58H/A23-58L94GLTG. MX834 and MX837 contain one VH/VL pair of A19-46, one VH/VL pair of A19-61, and two VH/VL pairs of A23-58H/A23-58L93VGLTG. MX835 and MX838 contain one VH/VL pair of A19-46, one VH/VL pair of A19-61, and two VH/VL pairs of A23-58H/A23-58L94GLTG.

[0174] FIG. 12A-12F shows additional exemplary configurations of bivalent and tetravalent molecules.

[0175] FIG. 13A-13F shows additional exemplary configurations of tetravalent molecules having VH/VL binding pairs selected from B8, E8 and A19-46.

[0176] FIG. 14A-14L shows additional exemplary configurations of tetravalent molecules having VH/VL binding pairs selected from B8, A19-46 and E8.

[0177] FIG. 15A-15F shows additional exemplary configurations of tetravalent molecules having VH/VL binding pairs selected from E12, A19-46 and E8.

[0178] FIG. 16A-16L shows additional exemplary configurations of tetravalent molecules having VH/VL binding pairs selected from E12, A19-46 and E8.

[0179] FIG. 17A-17E shows additional exemplary configurations of tetravalent molecules having VH/VL binding pairs selected from B8, E12, A23-58H/L93VGLTG, A19-46 and E8.

[0180] FIG. 18A-18L shows additional exemplary configurations of tetravalent molecules having VH/VL binding pairs selected from A23-58H/L93VGLTG, A19-46 and E8.

[0181] FIG. 19 shows the IC50 values (in nM) of the indicated molecules for neutralization of Omicron sublineages BA.1, BA.4/5, BA.2.12.1, BA.2.75, BA.4.6, BA.2.75.2, BQ.1.1, BJ.1 and XBB.

[0182] FIG. 20 shows the IC50 values (in nM) of the indicated molecules for neutralization of Omicron sublineages BA.4/5, BQ.1, BQ.1.1, BA.2.75.2 and XBB.

[0183] FIG. 21 shows the IC50 values (in nM) of the indicated molecules for neutralization of Omicron sublineages BA.4/5, BQ.1, BQ.1.1, BA.2.75.2 and XBB.

[0184] FIG. 22 shows the IC50 and IC80 values (in nM) of the indicated molecules for neutralization of Omicron sublineages BA.4/5, BQ.1, BQ.1.1, BA.2.75.2, XBB, XBB1.5, BF.7 and CH.1.1. Class designations are shown in column 2 in the table

[0185] FIG. 23 shows an epitope map of Omicron, indicating various mutations and variants.

[0186] FIG. 24 shows the blood levels of MX1069, MX1043, MX1206, MX1089 and MX1042 in Syrian hamsters up to 21 days after infusion.

[0187] FIG. 25 shows a diagram of a passive transfer experiment performed in Syrian hamsters using MX1069 and MX1089 and XBB virus.

[0188] FIG. 26A shows the percent body weight change of XBB-infected animals treated with MX1069 and MX1089.

[0189] FIG. 26B shows the lung viral load (left panel) and nares viral load (right panel) of XXB-infected animals treated with MX1069 and MX1089.

[0190] FIG. 27 shows a diagram of a passive transfer experiment performed in Syrian hamsters, using MX1042 and MX1043 and XBB virus.

[0191] FIG. 28A shows the percent body weight change of XBB-infected animals treated with MX1042, MX1043 and a combination of MX1042 and MX1043.

[0192] FIG. 28B shows the lung viral load (left panel) and nares viral load (right panel) of XXB-infected animals treated with MX1042, MX1043 and a combination of MX1042 and MX1043.

[0193] FIG. 29A shows the size exclusion chromatography (SEC) elution profile of 46.1-182.1v/61.1-182.1v for preparative and analytic SEC.

[0194] FIG. 29B shows the IC50 and IC80 values (in pM) of the indicated molecules, for neutralization of Omicron sublineages B.1.1.7, BA.1, BA.2 and BA.4/5.

[0195] FIG. 30A shows lung histopathology representative images of BA.5-infected Syrian hamsters treated with PBS or 46.1-182.1v/61.1-182.1v at Day 2 and Day 4.

[0196] FIG. 30B shows lung histopathology representative images of BA.5-infected Syrian hamsters treated with PBS or 46.1-182.1v/61.1-182.1v at Day 6 and Day 10.

[0197] FIG. 31 shows SARS-CoV-2 escape potential by multispecific antibodies MX1043, MX1042, MX1069 and MX1089, compared to combinations of antibodies (E12+A19-46.1+E8; E12+E8; and MX1042+MX1043) and LY1404. Shown for each antibody is the maximum concentration with >20% CPE that was passaged forward in each round of selection. Structures for the relevant antibodies and the resulting IC50 and IC80 values are also shown.

[0198] FIG. 32 shows the results of a pharmacokinetic study to assess the properties of parental monoclonal antibodies F769-E12, F769-B1, E76-B8 and F770-E8, compared to bispecific antibodies MX1042 (E8×E12) and MX1043 (E12×A19-46); trispecific antibody MX1069 (A19-46×E12/E12×E8); and tetraspecific antibodies MX1089 (A19-46×B8/E8×A23-58H/L93VGLTG) and MX1206 (A19-46×E12/E8×A23-58H/L93VGLTL).

[0199] FIG. 33 shows the characterization of mRNA-LNP described in the examples, including the average diameter (nm) and polydispersity index (PDI).

[0200] FIG. 34 shows a diagram of the mouse model used to evaluate in vivo expression of mRNA-LNPs.

[0201] FIG. 35 shows blood antibody concentration in g/mL of mice treated with the indicated mRNA-LNP.

[0202] FIG. 36 shows an exemplary configuration of a monospecific, trivalent cross-over dual variable (CODV) immunoglobulin antibody made utilizing variable fragments (Fv) from the anti-SARS-CoV-2 antibody, B1-182.1 (Fv182.1, dotted). The Fc region contains a knob-into-hole modification to increase yield and correct association of heavy chains.

[0203] FIG. 37A-37C shows exemplary configurations of bispecific, trivalent CODV immunoglobulin antibodies made utilizing variable fragments (Fv) from B1-182.1 (Fv182.1, dotted) and the anti-SARS-CoV-2 antibody, A19-61.1 (Fv61.1, grid). The Fc region contains a knob-into-hole modification to increase yield and correct association of heavy chains.

[0204] FIG. 38A-38D shows exemplary configurations of trispecific, trivalent CODV immunoglobulin antibodies made utilizing variable fragments (Fv) from B1-182.1 (“182.1” or “Fv182 Class I”, dotted), the anti-SARS-CoV-2 antibody, A19-46.1 (“46.1” or “Fv46 Class II”, striped) and A19-61.1 (“61.1” or “Fv61 Class III”, grid). The Fc region contains a knob-into-hole modification to increase yield and correct association of heavy chains.

[0205] FIG. 39A shows purity of CODV immunoglobulin antibodies evaluated under non-reducing (nr) and reducing (r) conditions on a Coomassie SDS-PAGE gel (representative gels shown). A molecular weight marker standard (MW) is also shown.

[0206] FIG. 39B shows CODV immunoglobulin bispecific and trispecific antibody traces shown before (top row) and after size exclusion chromatography (SEC) (bottom row). The dotted box indicates the fractions combined to make final preparations of the indicated multispecific antibodies. The bottom row shows analytic SEC traces for the purified multispecific antibodies.

[0207] FIG. 40A shows cross-over dual variable immunoglobulin antibody designs used in FIGS. 40B-40E.

[0208] FIG. 40B shows the expected binding of Fv182.1 (“Fv182”), Fv46.1 (“Fv46”), and Fv61.1 (“Fv61”) to viral spike receptor-binding domain (RBD) proteins containing the indicated Fv isolating mutations, that were selected to knockout binding a single component Fv while leaving binding of the remain Fv components unchanged.

[0209] FIG. 40C-40E shows validation of multispecific Fv binding activity using Fv isolating mutations in RBD and enzyme-linked immunosorbent assay (ELISA). Shown is ELISA binding for parental component antibody controls (FIG. 40C, B1-182.1, A19-46.1, and A19-61.1), bispecific antibodies (FIG. 40D, 182.1/182.1-61.1, 182.1/61.1-182.1, 61.1/182.1-182.1, 61.1/61.1-182.1 and 61.1/182.1-61.1), and trispecific antibodies (FIG. 40E, 46.1/61.1-182.1, 46.1/182.1-61.1, 61.1/46.1-182.1 and 61.1/182.1-46.1) against WA-1 RBD (wt) or RBD proteins containing one or more Fv-specific mutation shown and chosen to interrogate binding of one Fv component at a time in each multispecific antibody.

[0210] FIG. 41A shows a schematic illustration of arrangement of antibody variable domains in different CODVs. The domains are dotted, striped, grid, and gray for Fv182.1 (182.1), Fv46.1 (46.1), Fv61.1 (61.1) and constant domains, respectively.

[0211] FIG. 41B shows combinations of RBD mutations on the SARS-CoV-2 spike designed to distinguish different binding modes of CODV.

[0212] FIG. 41C is a schematic of CODV 61.1-182.1 (left) and binding of the CODV 61.1-182.1 to spike protein mutants (middle left and right). For clarity, the Fv domain that is not able to bind to the mutant is colored black. CODV binding to K444E/L452R mutant was observed, indicating CODV 61.1-182.1 can bind to spike protein through Fv182 domain (middle left). However, no CODV was observed to bind the L452R/F486S mutant (middle right), suggesting that the CODV 61.1-182.1 cannot bind through the Fv61 domain in the trimer context. A model of the CODV 61.1-182.1 bound to the SARS-CoV-2 spike protein is shown in the allowed Fv182-binding mode (right). For clarity, only one CODV is shown to bind to the spike protein in RBD-up conformation. The white scale bar represents 10 nm.

[0213] FIG. 41D is a schematic of CODV 182.1-61.1 (left) and binding of the CODV 182.1-61.1 to spike protein mutants (middle left and right). For clarity, the Fv domain that is not able to bind to the mutant is colored black. CODV was observed to bind both K444E/L452R and L452R/F486S mutants, indicating the CODV 182.1-61.1 can bind to spike protein through either Fv182 domain (middle left) or Fv61 domain (middle right). Models of the CODV 182.1-61.1 bound to the SARS-CoV-2 spike protein are shown in both Fv182.1-binding and Fv61.1-binding modes (right). The scale is the same as in FIG. 41C.

[0214] FIG. 41E is a schematic of CODV 46.1-182.1 (left) and binding of the CODV 46.1-182.1 to spike protein mutants (middle left and right). For clarity, the Fv domain that is not able to bind to the mutant is colored black. CODV was observed to bind both K444E/L452R and K444E/F486S mutants, indicating the CODV 46.1-182.1 can bind to the spike protein through both Fv182 and Fv46 domains (middle left and right). Models of the CODV 46.1-182.1 bound to the SARS-CoV-2 spike protein are shown to bind through Fv182 and Fv46-binding modes (right). The scale is the same as in FIG. 41C.

[0215] FIG. 41F is a schematic of CODV 182.1-46.1 (left) and binding of the CODV 182.1-46.1 to spike protein mutants (middle left and right). For clarity, the Fv domain that is not able to bind to the mutant is colored black. CODV was observed to bind K444E/L452R, indicating the CODV 182.1-46.1 can bind to the spike protein through the Fv182.1 domain (middle left). However, no CODV was observed to bind the K444E/F486S mutant (middle right), suggesting that the CODV 182.1-46.1 cannot bind through the Fv46 domain in the trimer context. Model of the CODV 182.1-46.1 bound to the SARS-CoV-2 spike protein is shown to bind through the allowed Fv182 domain (right). The scale is the same as in FIG. 41C.

[0216] FIG. 41G shows CODV 46.1-182.1- and 182.1-46.1-induced aggregation of the Omicron spike protein using negative stain-electron microscopy (NSEM).

[0217] FIG. 41H shows the spike-aggregating potential of 61.1/46.1-182.1 using NSEM.

[0218] FIG. 42 shows results from three independent experiments showing SARS-CoV-2 escape potential of T3_V3 (having 61.1, 46.1 and 182.1 binding regions), compared to an antibody having binding regions for 182.1, 61.1 and 46.1 (182.1+61.1+46.1); an antibody having binding regions for 182.1 (182.1); bebtelovimab (LY1404); and an AZD7442 cocktail (2196+2130).

[0219] FIG. 43 shows the resulting serum concentration of E8 glycosylation mutant antibodies in g/mL, at days 1, 2, 5, 7, 9, 14, 21, 28 and 35, following infusion of mice at 5 mg antibody/kg of body weight.

### DETAILED DESCRIPTION

[0220] Provided herein are antigen binding polypeptides and polypeptide complexes having improved features. In some aspects, the antigen binding polypeptides and polypeptide complexes have broad reactivity against SARS-CoV-2 variants of concern (VOCs) and/or resistance to SARS-CoV-2 escape. In some aspects, the antigen binding polypeptides and polypeptide complexes provided herein are easier to manufacture and administer than current therapeutic antibody cocktails. In some aspects, the antigen binding polypeptides and polypeptide complexes treat and/or prevent SARS-CoV-2 infection and/or COVID-19 in immunocompromised individuals who cannot mount an effective immune response through vaccinations.

[0221] Various terms relating to aspects of disclosure are used throughout the specification and claims. Such terms are to be given their ordinary meaning in the art, unless otherwise indicated. Other specifically defined terms are to be construed in a manner consistent with the definitions provided herein.

### Definitions

[0222] As used herein, the term “SARS-CoV-2” refers to “severe acute respiratory syndrome coronavirus 2.” SARS-CoV-2 is the strain of coronavirus that causes coronavirus disease 2019 (COVID-19).

[0223] As used herein, the term “SARS-CoV-2 virus” includes to the SARS-CoV-2 virus, virion or fragment thereof.

[0224] As used herein, the term “COVID-19” refers to “coronavirus disease 2019.” COVID-19 is caused by the SARS-CoV-2 virus. Symptoms of COVID-19 are variable, but often include fever, cough, headache, fatigue, breathing difficulties, loss of smell, and loss of taste. Symptoms may begin one to fourteen days after exposure to the virus; however, at least a third of people who are infected do not develop noticeable symptoms. Of those people who develop symptoms noticeable enough to be classed as patients, most develop mild to moderate symptoms (up to mild pneumonia), with approximately 15% developing severe symptoms (dyspnea, hypoxia, or more than 50% lung involvement on imaging), and approximately 5% suffering critical symptoms (respiratory failure, shock, or multiorgan dysfunction). Some people continue to experience a range of effects for months after recovery (“long COVID”).

[0225] As used herein, the term “SARS-CoV-2 protein” refers to any protein related to the SARS-CoV-2 virus. The SARS-CoV-2 virus is made of 16 non-structural proteins and four structural proteins. The non-structural proteins are involved mainly in virus replication. The structural proteins include the membrane protein, nucleocapsid protein, envelope protein, and spike protein, which are involved in assembly and infection of the virus. This has two subunits, S1 and S2, which are responsible for the specific recognition of human angiotensin converting enzyme 2 (hACE2) on the surface of host cells and viral entry. S1 specifically binds the hACE2 through its receptor-binding domain (RBD), whereas S2 facilitates the fusion of the virus to the cell membrane. As such, as used herein, a SARS-CoV-2 protein includes, but is not limited to, a membrane protein, nucleocapsid protein, envelope protein, or spike protein, or a combination thereof. In some aspects, the SARS-CoV-2 protein is a spike protein.

[0226] In some aspects, an antigen binding polypeptide or antigen binding polypeptide complex provided herein (e.g., an antibody or antigen binding fragment thereof) is, or is part of, a class I antibody, a class II antibody, or a class III antibody.

[0227] As used herein, “class I” refers to an antibody that typically contains a short heavy chain CDR3 region and competes with angiotensin-converting enzyme 2 (ACE2) for binding to the receptor binding domain (RBD) of the spike protein, and only recognizes the “up” configuration of the RBD. See, e.g., Shrestha et al., Front. Immunol. 12:7520003, 2021. As used herein, “class II” refers to an antibody that typically has a long heavy chain CDR3 loop, competes with ACE2 for binding to RBD, and is capable of binding to RBD in both the “up” and “down” configurations. As used herein, “class III” refers to an antibody that is capable of binding to RBD in both the “up” and “down” configurations and typically binds outside of the ACE2 binding region. As used herein, “class IV” refers to an antibody that binds to the highly conserved, cryptic epitope on RBD outside the receptor binding motif (RBM) of the spike protein.

[0228] In some aspects, an antigen binding polypeptide or antigen binding polypeptide complex provided herein (e.g., an antibody or antigen binding fragment thereof) belongs to two, three or four classes. Accordingly, in some aspects, an antigen binding polypeptide or antigen binding polypeptide complex provided herein (e.g., an antibody or antigen binding fragment thereof) is a class I and II antibody, class I and III antibody, class I and IV antibody, class II and III antibody, class II and IV antibody, class III and IV antibody, class I, II and III antibody, class I, II and IV antibody, class I, III and IV antibody, class II, III and IV antibody, or class I, II, III and IV antibody.

[0229] In some aspects, an antigen binding polypeptide or antigen binding polypeptide complex provided herein comprises one or more class I antigen binding sites, one or more class II antigen binding sites, and/or one or more class III antigen binding sites. In some aspects, VH1 and VL1 and/or VH3 and VL3 are class III antigen binding sites. In some aspects, VH2 and VL2 and/or VH4 and VL4 are class I antigen binding sites. In some aspects, VH1, VL1, VH3 and VL3 are class III antigen binding sites and VH2, VL2, VH4 and VL4 are class I antigen binding sites. In some aspects, VH1 and VL1 are class II antigen binding sites. In some aspects, VH2 and VL2 are class I antigen binding sites. In some aspects, VH3 and VL3 are class I antigen binding sites. In some aspects, VH4 and VL4 are class III antigen binding sites. In some aspects, VH1 and VL1 are class II antigen binding sites, VH2 and VL2 are class I antigen binding sites, VH3 and VL3 are class I antigen binding sites, and VH4 and VL4 are class III antigen binding sites.

[0230] As used herein, the term “spike protein” refers to the largest of the four structural proteins found in the SARS-CoV-2 virus. The spike protein assembles into trimers that form large structures, called spikes or peplomers, that project from the surface of the SARS-CoV-2 virion and mediate entry of the virion into host cells. The SARS-CoV-2 spike protein is also called “spike (S) glycoprotein” and E2. The structural and functional properties of this protein have been characterized. See, e.g., Huang et al., Acta Pharmacol. Sin. 41:1141-1149, 2020; Wu et al., Nature 579(7798):265-269, 2020; and Gene ID: 43740568.

[0231] Antigen binding sequences (e.g., CDR, VH, VL, heavy chain and light chain sequences from antibodies) for anti-SARS-CoV-2 proteins are known. Such sequences include, but are not limited to SEQ ID NOs:38-788.

[0232] As used herein, the term “antigen binding polypeptide” refers to a polypeptide having the ability to specifically bind to one or more substances that induce an immune response (i.e., one or more antigens or epitopes).

[0233] As used herein, the term “antigen binding polypeptide complex” refers to a group of two, three, four, or more associated polypeptides, wherein at least one polypeptide has the ability to specifically bind to one or more antigens. An antigen binding polypeptide complex, includes, but is not limited to, an antibody or antigen binding fragment thereof.

[0234] The term “antibody” includes, without limitation, a glycoprotein immunoglobulin which binds specifically to an antigen and comprises at least two heavy (H) chains and two light (L) chains interconnected by disulfide bonds. Each H chain comprises a heavy chain variable region (abbreviated herein as VH) and a heavy chain constant region. The heavy chain constant region comprises three constant domains, CH1, CH2 and CH3. Each light chain comprises a light chain variable region (abbreviated herein as VL) and a light chain constant region. The light chain constant region comprises one constant domain, CL. The VH and VL regions can be further subdivided into regions of hypervariability, termed complementarity determining regions (CDRs), interspersed with regions that are more conserved, termed framework regions (FR). Each VH and VL comprises three CDRs and four FRs, arranged from amino-terminus to carboxy-terminus in the following order: FR1, CDR1, FR2, CDR2, FR3, CDR3, FR4. The variable regions of the heavy and light chains contain a binding domain that interacts with an antigen. The constant regions of the antibodies may mediate the binding of the immunoglobulin to host tissues or factors, including various cells of the immune system (e.g., effector cells) and the first component (C1q) of the classical complement system. A heavy chain may have the C-terminal lysine or not. Unless specified otherwise herein, the amino acids in the variable regions are numbered using the Kabat numbering system and those in the constant regions are numbered using the EU system.

[0235] The term “monoclonal antibody,” as used herein, refers to an antibody that is produced by a single clone of B-cells and binds to the same epitope. In contrast, the term “polyclonal antibody” refers to a population of antibodies that are produced by different B-cells and bind to different epitopes of the same antigen. The term “antibody” includes, by way of example, monoclonal and polyclonal antibodies; chimeric and humanized antibodies; human or non-human antibodies; wholly synthetic antibodies; and single chain antibodies. A non-human antibody can be humanized by recombinant methods to reduce its immunogenicity in man.

[0236] The antibody can be an antibody that has been altered (e.g., by mutation, deletion, substitution, conjugation to a non-antibody moiety). For example, an antibody can include one or more variant amino acids (compared to a naturally occurring antibody) which change a property (e.g., a functional property) of the antibody. For example, several such alterations are known in the art which affect, e.g., half-life, effector function, and/or immune responses to the antibody in a patient. The term antibody also includes artificial polypeptide constructs which comprise at least one antibody-derived antigen binding site.

[0237] An “antigen binding fragment” of an antibody refers to one or more fragments or portions of an antibody that retain the ability to bind specifically to the antigen bound by the whole antibody. It has been shown that the antigen binding function of an antibody can be performed by fragments or portions of a full-length antibody. An antigen binding fragment can contain the antigenic determining regions of an intact antibody (e.g., the complementarity determining regions (CDRs)). Examples of antigen binding fragments of antibodies include, but are not limited to, Fab, Fab′, F(ab′)₂, and Fv fragments, linear antibodies, and single chain antibodies. An antigen binding fragment of an antibody can be derived from any animal species, such as rodents (e.g., mouse, rat, or hamster) and humans or can be artificially produced.

[0238] Furthermore, although the two domains of the Fv fragment, VL and VH, are coded for by separate genes, they can be joined, using recombinant methods, by a synthetic linker that enables them to be made as a single protein chain in which the VL and VH regions pair to form monovalent molecules (known as single chain Fv (scFv); see, e.g., Bird et al. (1988) Science 242:423-426; and Huston et al. (1988) Proc. Natl. Acad. Sci. USA 85:5879-5883). Such single chain antibodies are also intended to be encompassed within the term “antigen-binding fragment” of an antibody.

[0239] Antigen binding fragments are obtained using conventional techniques known to those with skill in the art, and the fragments screened for utility in the same manner as are intact antibodies. Antigen binding fragments can be produced by recombinant DNA techniques, or by enzymatic or chemical cleavage of intact immunoglobulins.

[0240] As used herein, the term “variable region” typically refers to a portion of an antibody, generally, a portion of a light or heavy chain, typically about the amino-terminal 110 to 120 amino acids, or 110 to 125 amino acids in the mature heavy chain and about 90 to 115 amino acids in the mature light chain, which differ extensively in sequence among antibodies and are used in the binding and specificity of a particular antibody for its particular antigen. The variability in sequence is concentrated in those regions called complementarity determining regions (CDRs) while the more highly conserved regions in the variable domain are called framework regions (FR). Without wishing to be bound by any particular mechanism or theory, it is believed that the CDRs of the light and heavy chains are primarily responsible for the interaction and specificity of an antibody with antigen. In some aspects, the variable region is a mammalian variable region, e.g., a human, mouse or rabbit variable region. In some aspects, the variable region comprises rodent or murine CDRs and human framework regions (FRs). In some aspects, the variable region is a primate (e.g., non-human primate) variable region. In some aspects, the variable region comprises rodent or murine CDRs and primate (e.g., non-human primate) framework regions (FRs).

[0241] The terms “complementarity determining region” or “CDR”, as used herein, refer to each of the regions of an antibody variable domain which are hypervariable in sequence and/or form structurally defined loops (hypervariable loops) and/or contain the antigen-contacting residues. Antibodies can comprise six CDRs, e.g., three in the VH and three in the VL.

[0242] The terms “VL”, “VL region,” and “VL domain” are used herein interchangeably to refer to the light chain variable region of an antigen binding polypeptide, antigen binding polypeptide complex, antibody or antigen binding fragment thereof. In some aspects, a VL region is referred to herein as VL1 to denote a first light chain variable region, VL2 to denote a second light chain variable region, VL3 to denote a third light chain variable region, and VL4 to denote a fourth light chain variable region. An enumerated VL region (e.g., VL1) can have the same or different antigen binding properties and/or the same or different sequence as another enumerated VL region (e.g., VL2).

[0243] The terms “VH”, “VH region,” and “VH domain” are used herein interchangeably to refer to the heavy chain variable region of an antigen binding polypeptide, antigen binding polypeptide complex, antibody or antigen binding fragment thereof. In some aspects, a VH region is referred to herein as VH1 to denote a first heavy chain variable region, VH2 to denote a second heavy chain variable region, VH3 to denote a third heavy chain variable region, and VH4 to denote a fourth heavy chain variable region. An enumerated VH region (e.g., VH1) can have the same or different antigen binding properties and/or the same or different sequence as another enumerated VH region (e.g., VH2).

[0244] As used herein, “Kabat numbering” and like terms are recognized in the art and refer to a system of numbering amino acid residues in the heavy and light chain variable regions of an antibody or antigen binding fragment thereof. In some aspects, CDRs can be determined according to the Kabat numbering system (see, e.g., Kabat E A & Wu T T (1971) Ann NY Acad Sci 190: 382-391 and Kabat E A et al., (1991) Sequences of Proteins of Immunological Interest, Fifth Edition, U.S. Department of Health and Human Services, NIH Publication No. 91-3242). Using the Kabat numbering system, CDRs within an antibody heavy chain molecule are typically present at amino acid positions 31 to 35, which optionally can include one or two additional amino acids, following 35 (referred to in the Kabat numbering scheme as 35A and 35B) (CDR1), amino acid positions 50 to 65 (CDR2), and amino acid positions 95 to 102 (CDR3). Using the Kabat numbering system, CDRs within an antibody light chain molecule are typically present at amino acid positions 24 to 34 (CDR1), amino acid positions 50 to 56 (CDR2), and amino acid positions 89 to 97 (CDR3).

[0245] As used herein, the terms “constant region” or “constant domain” are used interchangeably to refer to a portion of an antigen binding polypeptide, antigen binding polypeptide complex, antibody or antigen binding fragment thereof, e.g., a carboxyl terminal portion of a light and/or heavy chain which is not directly involved in binding of an antibody to antigen but which can exhibit various effector functions, such as interaction with the Fc region. The constant region generally has a more conserved amino acid sequence relative to a variable region. In some aspects, an antigen binding polypeptide, antigen binding polypeptide complex, antibody or antigen binding fragment thereof comprises a constant region or portion thereof that is sufficient for antibody-dependent cell-mediated cytotoxicity (ADCC), antibody-dependent cellular phagocytosis (ADCP), and complement-dependent cytotoxicity (CDC). A constant region includes, but is not limited to, a light chain constant region (CL) or heavy chain constant region (CH1, CH2, CH3).

[0246] As used herein, the terms “fragment crystallizable region,” “Fc region,” or “Fc domain” are used interchangeably herein to refer to the tail region of an antibody that interacts with cell surface receptors called Fc receptors and some proteins of the complement system. Fc regions typically comprise CH2 and CH3 regions, and, optionally, an immunoglobulin hinge.

[0247] As used herein, the terms “immunoglobulin hinge,” “hinge,” “hinge domain” or “hinge region” are used interchangeably to refer to a stretch of heavy chains between the Fab and Fc portions of an antigen binding polypeptide, antigen binding polypeptide complex, antibody or antigen binding fragment thereof. A hinge provides structure, position and flexibility, which assist with normal functioning of antibodies (e.g., for crosslinking two antigens or binding two antigenic determinants on the same antigen molecule). An immunoglobulin hinge is divided into upper, middle and lower hinge regions that can be separated based on structural and/or genetic components. An immunoglobulin hinge of the invention can contain one, two or all three of these regions. Structurally, the upper hinge region stretches from the C terminal end of CH1 to the first hinge disulfide bond. The middle hinge region stretches from the first cysteine to the last cysteine in the hinge. The lower hinge region extends from the last cysteine to the glycine of CH2. The cysteines present in the hinge form interchain disulfide bonds that link the immunoglobulin monomers.

[0248] As used herein, the term “Fab” refers to a region of an antibody that binds to an antigen. It is typically composed of one constant and one variable domain of each of the heavy and the light chain.

[0249] As used herein, the term “heavy chain” refers to a portion of an antigen binding polypeptide, antigen binding polypeptide complex, antibody or antigen binding fragment thereof typically composed of a heavy chain variable region (VH), a heavy chain constant region 1 (CH1), a heavy chain constant region 2 (CH2), and a heavy chain constant region 3 (CH3). A typical antibody is composed of two heavy chains and two light chains. When used in reference to an antibody, a heavy chain can refer to any distinct type, e.g., alpha (a), delta (S), epsilon (F), gamma (γ), and mu (p), based on the amino acid sequence of the constant region, which gives rise to IgA, IgD, IgE, IgG, and IgM classes of antibodies, respectively, including subclasses of IgG, e.g., IgG1, IgG2, IgG3, and IgG4. Heavy chain amino acid sequences are known in the art. In some aspects, the heavy chain is a human heavy chain.

[0250] As used herein, the term “light chain” refers to a portion of an antigen binding polypeptide, antigen binding polypeptide complex, antibody or antigen binding fragment thereof typically composed of a light chain variable region (VL) and a light chain constant region (CL). A typical antibody is composed of two light chains and two heavy chains. When used in reference to an antibody, a light chain can refer to any distinct type, e.g., kappa (x) or lambda (k), based on the amino acid sequence of the constant region. Light chain amino acid sequences are known in the art. In some aspects, the light chain is a human light chain.

[0251] The term “chimeric” antibody or antigen binding fragment thereof refers to an antibody or antigen binding fragments thereof wherein the amino acid sequence is derived from two or more species. Typically, the variable region of both light and heavy chains corresponds to the variable region of antibodies or antigen binding fragments thereof derived from one species of mammals (e.g., mouse, rat, rabbit, etc.) with the desired specificity, affinity and capability, while the constant regions are homologous to the sequences in antibodies or antigen binding fragments thereof derived from another (usually human) to avoid eliciting an immune response in that species.

[0252] The term “humanized” antibody or antigen binding fragment thereof refers to forms of non-human (e.g., murine) antibodies or antigen binding fragments that are specific immunoglobulin chains, chimeric immunoglobulins, or fragments thereof that contain minimal non-human (e.g., murine) sequences. Typically, humanized antibodies or antigen binding fragments thereof are human immunoglobulins in which residues from a complementary determining region (CDR) are replaced by residues from a CDR of a non-human species (e.g., mouse, rat, rabbit, hamster) that have the desired specificity, affinity, and capability (Jones et al., Nature 321:522-525 (1986); Riechmann et al., Nature 332:323-327 (1988); Verhoeyen et al., Science 239:1534-1536 (1988)). In some aspects, the Fv framework region (FR) residues of a human immunoglobulin are replaced with the corresponding residues in an antibody or fragment from a non-human species that has the desired specificity, affinity, and capability. The humanized antibody or antigen binding fragment thereof can be further modified by the substitution of additional residues either in the Fv framework region and/or within the replaced non-human residues to refine and optimize antibody or antigen-binding fragment thereof specificity, affinity, and/or capability. In general, a humanized antibody or antigen binding fragment thereof will comprise substantially all of at least one, and typically two or three, variable domains containing all or substantially all of the CDR regions that correspond to the non-human immunoglobulin whereas all or substantially all of the FR regions are those of a human immunoglobulin consensus sequence. A humanized antibody or antigen binding fragment thereof can also comprise at least a portion of a constant region, typically that of a human immunoglobulin. Examples of methods used to generate humanized antibodies are known and described, for example, in U.S. Pat. No. 5,225,539; Roguska et al., Proc. Natl. Acad. Sci., USA, 91(3):969-973 (1994), and Roguska et al., Protein Eng. 9(10):895-904 (1996).

[0253] The term “human” antibody or antigen binding fragment thereof, as used herein, means an antibody or antigen binding fragment thereof having an amino acid sequence derived from a human immunoglobulin gene locus, where such antibody or antigen binding fragment is made using recombinant techniques known in the art. This definition of a human antibody or antigen binding fragment thereof includes intact or full-length antibodies and fragments thereof.

[0254] A polypeptide, polypeptide complex, antibody, antigen binding fragment thereof, polynucleotide, vector or host cell which is “isolated” is a polypeptide, polypeptide complex, antibody, antigen binding fragment thereof, polynucleotide, vector or host cell which is in a form not found in nature. Isolated polypeptides, polypeptide complexes, antibodies, antigen binding fragments thereof, polynucleotides, vectors or host cells include those which have been purified to a degree that they are no longer in a form in which they are found in nature. In some aspects, a polypeptide, polypeptide complex, antibody, antigen binding fragment thereof, polynucleotide, vector or host cell which is isolated is substantially pure. As used herein, “substantially pure” refers to material which is at least 50% pure (i.e., free from contaminants), at least 90% pure, at least 95% pure, at least 98% pure, or at least 99% pure.

[0255] The terms “polypeptide,” “peptide,” and “protein” are used interchangeably herein to refer to polymers of amino acids of any length. The polymer can be linear or branched, it can comprise modified amino acids, and it can be interrupted by non-amino acids. The terms also encompass an amino acid polymer that has been modified naturally or by intervention; for example, disulfide bond formation, glycosylation, lipidation, acetylation, phosphorylation, or any other manipulation or modification, such as conjugation with a labeling component. Also included within the definition are, for example, polypeptides containing one or more analogs of an amino acid (including, for example, unnatural amino acids, etc.), as well as other modifications known in the art. It is understood that, because the polypeptides of this invention are based upon antibodies, in some aspects, the polypeptides can occur as single chains or associated chains.

[0256] As used herein, an “isoelectric point” or “pI” refer to the pH at which the net charge of a polypeptide (e.g., an antigen binding polypeptide or antigen binding polypeptide complex provided herein) is zero.

[0257] As used herein, “pH” refers to a quantitative measure of acidity or basicity. This term translates the values of the concentration of the hydrogen ion-which ordinarily ranges between about 1 and 10⁻¹⁴ gram-equivalents per litre-into numbers between 0 and 14.

[0258] As used herein, “SARS-CoV-2 escape” refers to the process by which a SARS-CoV-2 virus acquires one or more mutations that allow the virus to evade the antibodies generated by a particular vaccine.

[0259] As used herein, “SARS-CoV-2 evolution” refers to the heritable genetic changes that a SARS-CoV-2 virus accumulates during its life time, which can arise from adaptations in response to environmental changes or the immune response of the host.

[0260] The use of the alternative (e.g., “or”) should be understood to mean either one, both, or a combination thereof of the alternatives. As used herein, the indefinite articles “a” or “an” should be understood to refer to “one or more” of any recited or enumerated component.

[0261] As used herein, the term “and/or” is to be taken as specific disclosure of each of the two specified features or components with or without the other. Thus, the term “and/or” as used in a phrase such as “A and/or B” herein is intended to include “A and B,” “A or B,” “A” (alone), and “B” (alone). Likewise, the term “and/or” as used in a phrase such as “A, B, and/or C” is intended to encompass each of the following aspects: A, B, and C; A, B, or C; A or C; A or B; B or C; A and C; A and B; B and C; A (alone); B (alone); and C (alone).

[0262] It is understood that wherever aspects are described herein with the language “comprising,” “having,” or the like, otherwise analogous aspects described in terms of “consisting of” and/or “consisting essentially of” are also provided.

[0263] As used herein, the term “about” refers to a value or composition that is within an acceptable error range for the particular value or composition as determined by one of ordinary skill in the art, which will depend in part on how the value or composition is measured or determined, i.e., the limitations of the measurement system. For example, “about” can mean within 1 or more than 1 standard deviation per the practice in the art. Alternatively, “about” can mean a range of up to 10% or 20% (i.e., ±10% or ±20%). For example, about 3 mg can include any number between 2.7 mg and 3.3 mg (for 10%) or between 2.4 mg and 3.6 mg (for 20%). Furthermore, particularly with respect to biological systems or processes, the terms can mean up to an order of magnitude or up to 5-fold of a value. When particular values or compositions are provided in the application and claims, unless otherwise stated, the meaning of “about” should be assumed to be within an acceptable error range for that particular value or composition.

[0264] As described herein, any numerical range, concentration range, percentage range, ratio range or integer range is to be understood to include the value of any integer within the recited range and, when appropriate, fractions thereof (such as one-tenth and one-hundredth of an integer), unless otherwise indicated.

[0265] Unless defined otherwise, all technical and scientific terms used herein have the same meaning as commonly understood by one of ordinary skill in the art to which this disclosure is related. For example, the Concise Dictionary of Biomedicine and Molecular Biology, Juo, Pei-Show, 2nd ed., 2002, CRC Press; The Dictionary of Cell and Molecular Biology, 5th ed., 2013, Academic Press; and the Oxford Dictionary Of Biochemistry And Molecular Biology, 2006, Oxford University Press, provide one of skill with a general dictionary of many of the terms used in this disclosure.

[0266] Units, prefixes, and symbols are denoted in their Système International de Unites (SI) accepted form. Numeric ranges are inclusive of the numbers defining the range. The headings provided herein are not limitations of the various aspects of the disclosure, which can be had by reference to the specification as a whole. Accordingly, the terms defined herein are more fully defined by reference to the specification in its entirety.

[0267] Various aspects are described in further detail in the following sections.

### Antigen Binding Polypeptides and Polypeptide Complexes

[0268] Provided herein are antigen binding polypeptides and polypeptide complexes having certain structural and/or functional features.

[0269] For example, provided herein is a multispecific antibody selected from the group consisting of:
[0270] (a) an antigen binding polypeptide having a structure represented by:
   [0271] VL1-L1-VH1 or VH1-L2-VL1;
[0272] wherein:
   [0273] VL1 is a first immunoglobulin light chain variable region that specifically binds to a severe acute respiratory syndrome coronavirus 2 (SARS-CoV-2) protein;
   [0274] VH1 is a first immunoglobulin heavy chain variable region that specifically binds to a SARS-CoV-2 protein; and
   [0275] L1 and L2 are amino acid linkers; or
[0276] an antigen binding polypeptide having a structure represented by:
   [0277] VL1-L1-VL2-L2-VH2-L3-VH1;
   [0278] VL1-L1-VH2-L2-VL2-L3-VH1;
   [0279] VH1-L4-VH2-L5-VL2-L6-VL1; or
   [0280] VH1-L4-VL2-L5-VH2-L6-VL1;
[0281] wherein:
   [0282] VL1 is a first immunoglobulin light chain variable region that specifically binds to a SARS-CoV-2 protein;
   [0283] VL2 is a second immunoglobulin light chain variable region that specifically binds to a SARS-CoV-2 protein;
   [0284] VH1 is a first immunoglobulin heavy chain variable region that specifically binds to a SARS-CoV-2 protein;
   [0285] VH2 is a second immunoglobulin heavy chain variable region that specifically binds to a SARS-CoV-2 protein; and
   [0286] L1-L6 are amino acid linkers; and
[0287] wherein (a) is selected from any one of the more specific embodiments provided herein for an antigen binding polypeptide in an antigen binding polypeptide complex having no more than three polypeptide chains;
[0288] (b) an antigen binding polypeptide complex comprising a first polypeptide, a second polypeptide, a third polypeptide, and a fourth polypeptide;
[0289] wherein the first polypeptide has a structure represented by:
   [0290] VL1-L1-CL;
[0291] wherein the second polypeptide has a structure represented by:
   [0292] VH1-L2-CH1;
[0293] wherein the third polypeptide has a structure represented by:
   [0294] VH2-L3-VH3-L4-CH1;
[0295] wherein the fourth polypeptide has a structure represented by:
   [0296] VL3-L5-VL2-L6-CL; and
[0297] wherein:
   [0298] VL1 is a first immunoglobulin light chain variable region that specifically binds to a SARS-CoV-2 protein;
   [0299] VL2 is a second immunoglobulin light chain variable region that specifically binds to a SARS-CoV-2 protein;
   [0300] VL3 is a third immunoglobulin light chain variable region that specifically binds to a SARS-CoV-2 protein;
   [0301] VH1 is a first immunoglobulin heavy chain variable region that specifically binds to a SARS-CoV-2 protein;
   [0302] VH2 is a second immunoglobulin heavy chain variable region that specifically binds to a SARS-CoV-2 protein;
   [0303] VH3 is a third immunoglobulin heavy chain variable region that specifically binds to a SARS-CoV-2 protein;
   [0304] CH1 is an immunoglobulin heavy chain constant region 1;
   [0305] CL is an immunoglobulin light chain constant region; and
   [0306] L1-L6 are amino acid linkers; and
[0307] (c) an antigen binding polypeptide having a structure represented by:
   [0308] VL1-L1-VH1 or VH1-L2-VL1;
[0309] wherein:
   [0310] VL1 is a first immunoglobulin light chain variable region that specifically binds to a SARS-CoV-2 protein;
   [0311] VH1 is a first immunoglobulin heavy chain variable region that specifically binds to a SARS-CoV-2 protein; and
   [0312] L1 and L2 are amino acid linkers; or
[0313] an antigen binding polypeptide having a structure represented by:
   [0314] VL1-L1-VL2-L2-VH2-L3-VH1;
   [0315] VL1-L1-VH2-L2-VL2-L3-VH1;
   [0316] VH1-L4-VH2-L5-VL2-L6-VL1; or
   [0317] VH1-L4-VL2-L5-VH2-L6-VL1;
[0318] wherein:
   [0319] VL1 is a first immunoglobulin light chain variable region that specifically binds to a SARS-CoV-2 protein;
   [0320] VL2 is a second immunoglobulin light chain variable region that specifically binds to a SARS-CoV-2 protein;
   [0321] VH1 is a first immunoglobulin heavy chain variable region that specifically binds to a SARS-CoV-2 protein;
   [0322] VH2 is a second immunoglobulin heavy chain variable region that specifically binds to a SARS-CoV-2 protein; and
   [0323] L1-L6 are amino acid linkers;
[0324] wherein (c) is selected from any one of the more specific embodiments provided herein for an antigen binding polypeptide in an antigen binding polypeptide complex having no more than three polypeptide chains; and
[0325] wherein the antigen binding polypeptide further comprises one or more immunoglobulin heavy chain constant region 1 (CH1) and/or one or more immunoglobulin light chain constant region (CL) between any one of the variable regions and/or amino acid linkers (e.g., between VL1 and L1, between L1 and VH1, between VH1 and L2, between L2 and VL1, between L1 and VL2, between VL2 and L2, between L2 and VH2, between VH2 and L3, between L3 and VH1, between VL1 and L1, between L1 and VH2, between VH2 and L2, between, L2 and VL2, between VL2 and L3, between L3 and VH1, between VH1 and L4, between L4 and VH2, between VH2 and L5, between L5 and VL2, between VL2 and L6, between L6 and VL1, between VH1 and L4, between L4 and VL2, between L4 and VL2, between VL2 and L5, between L5 and VH2, between VH2 and L6, or between L6 and VL1).

[0326] Also provided herein is a multispecific antibody comprising a first polypeptide, a second polypeptide, a third polypeptide, and a fourth polypeptide;
[0327] wherein the first polypeptide has a structure represented by VL1-L1-CL;
[0328] wherein the second polypeptide has a structure represented by VH1-L2-CH1-L3-Fc;
[0329] wherein the third polypeptide has a structure represented by VH2-L4-VH3-L5-CH1-L6-Fc;
[0330] wherein the fourth polypeptide has a structure represented by VL3-L7-VL2-L8-CL; and
[0331] wherein VL1 is a first immunoglobulin light chain variable region that specifically binds to a SARS-CoV-2 protein;
[0332] VL2 is a second immunoglobulin light chain variable region that specifically binds to a SARS-CoV-2 protein;
[0333] VL3 is a third immunoglobulin light chain variable region that specifically binds to a SARS-CoV-2 protein;
[0334] VH1 is a first immunoglobulin heavy chain variable region that specifically binds to a SARS-CoV-2 protein;
[0335] VH2 is a second immunoglobulin heavy chain variable region that specifically binds to a SARS-CoV-2 protein;
[0336] VH3 is a third immunoglobulin heavy chain variable region that specifically binds to a SARS-CoV-2 protein;
[0337] Fc is a region comprising an immunoglobulin heavy chain constant region 2 (CH2), an immunoglobulin heavy chain constant region 3 (CH3), and optionally, an immunoglobulin hinge;
[0338] CH1 is an immunoglobulin heavy chain constant region 1;
[0339] CL is an immunoglobulin light chain constant region; and
[0340] L1-L8 are amino acid linkers.

[0341] In some aspects, the VH1, VH2 and/or VH3 (VH1; VH2; VH3; VH1 and VH2; VH1 and VH3; VH2 and VH3; VH1, VH2 and VH3) of the multispecific antibody comprises: a CDR1 comprising an amino acid sequence having at least 80%, at least 85%, at least 90%, at least 91%, at least 92%, at least 93%, at least 94%, at least 95%, at least 96%, at least 97%, at least 98%, at least 99% or 100% identity to any one of SEQ ID NOs:43, 51, 59, 67, 75, 171, 179, 187, 264, 272, 280, 288, 513, 521, 529, 537, 545, 553, 561, 569, 577, 585, 593, 601, 609, 617, 639, 647, 656 and 664; a CDR2 comprising an amino acid sequence having at least 80%, at least 85%, at least 90%, at least 91%, at least 92%, at least 93%, at least 94%, at least 95%, at least 96%, at least 97%, at least 98%, at least 99% or 100% identity to any one of SEQ ID NOs:44, 52, 60, 68, 76, 172, 180, 188, 265, 273, 281, 289, 514, 522, 530, 538, 546, 554, 562, 570, 578, 586, 594, 602, 610, 618, 640, 648, 657 and 665; and/or a CDR3 comprising an amino acid sequence having at least 80%, at least 85%, at least 90%, at least 91%, at least 92%, at least 93%, at least 94%, at least 95%, at least 96%, at least 97%, at least 98%, at least 99% or 100% identity to any one of SEQ ID NOs:45, 53, 61, 69, 77, 173, 181, 189, 266, 274, 282, 290, 515, 523, 531, 539, 547, 555, 563, 571, 579, 587, 595, 603, 611, 619, 641, 649, 658 and 666; and/or the VL1, VL2 and/or VL3 (VL1; VL2; VL3; VL1 and VL2; VL1 and VL3; VL2 and VL3; VL1, VL2 and VL3) of the multispecific antibody comprises: a CDR1 comprising an amino acid sequence having at least 80%, at least 85%, at least 90%, at least 91%, at least 92%, at least 93%, at least 94%, at least 95%, at least 96%, at least 97%, at least 98%, at least 99% or 100% identity to any one of SEQ ID NOs:43, 51, 59, 67, 75, 171, 179, 187, 264, 272, 280, 288, 513, 521, 529, 537, 545, 553, 561, 569, 577, 585, 593, 601, 609, 617, 639, 647, 656 and 664; a CDR2 comprising an amino acid sequence having at least 80%, at least 85%, at least 90%, at least 91%, at least 92%, at least 93%, at least 94%, at least 95%, at least 96%, at least 97%, at least 98%, at least 99% or 100% identity to any one of SEQ ID NOs:44, 52, 60, 68, 76, 172, 180, 188, 265, 273, 281, 289, 514, 522, 530, 538, 546, 554, 562, 570, 578, 586, 594, 602, 610, 618, 640, 648, 657 and 665; and/or a CDR3 comprising an amino acid sequence having at least 80%, at least 85%, at least 90%, at least 91%, at least 92%, at least 93%, at least 94%, at least 95%, at least 96%, at least 97%, at least 98%, at least 99% or 100% identity to any one of SEQ ID NOs:45, 53, 61, 69, 77, 173, 181, 189, 266, 274, 282, 290, 515, 523, 531, 539, 547, 555, 563, 571, 579, 587, 595, 603, 611, 619, 641, 649, 658 and 666. In some preferred aspects, CDR1, CDR2 and CDR3 of each of VH1, VH2, VH3, VL1, VL2 and VL3 have at least 90% identity with a corresponding amino acid sequence specified above. As used herein, “at least 90% identity” includes at least 91%, 92%, 93%, 94%, 95%, 96%, 97%, 98%, 99% and 100% identity to the recited reference sequence. In some particularly preferred aspects, CDR1, CDR2 and CDR3 of each of VH1, VH2, VH3, VL1, VL2 and VL3 comprise or consist of a corresponding amino acid sequence specified above.

[0342] In some aspects, VH1 and VH3 each comprise the same CDR1, CDR2 and/or CDR3 sequences (e.g., a CDR1 comprising an amino acid sequence having at least 80%, at least 85%, at least 90%, at least 91%, at least 92%, at least 93%, at least 94%, at least 95%, at least 96%, at least 97%, at least 98%, at least 99% or 100% identity to any one of SEQ ID NOs:43, 51, 59, 67, 75, 171, 179, 187, 264, 272, 280, 288, 513, 521, 529, 537, 545, 553, 561, 569, 577, 585, 593, 601, 609, 617, 639, 647, 656 and 664; a CDR2 comprising an amino acid sequence having at least 80%, at least 85%, at least 90%, at least 91%, at least 92%, at least 93%, at least 94%, at least 95%, at least 96%, at least 97%, at least 98%, at least 99% or 100% identity to any one of SEQ ID NOs:44, 52, 60, 68, 76, 172, 180, 188, 265, 273, 281, 289, 514, 522, 530, 538, 546, 554, 562, 570, 578, 586, 594, 602, 610, 618, 640, 648, 657 and 665; and/or a CDR3 comprising an amino acid sequence having at least 80%, at least 85%, at least 90%, at least 91%, at least 92%, at least 93%, at least 94%, at least 95%, at least 96%, at least 97%, at least 98%, at least 99% or 100% identity to any one of SEQ ID NOs:45, 53, 61, 69, 77, 173, 181, 189, 266, 274, 282, 290, 515, 523, 531, 539, 547, 555, 563, 571, 579, 587, 595, 603, 611, 619, 641, 649, 658 and 666, or any other CDR sequence within a larger VH or full length polypeptide chain sequence disclosed herein), and/or VL1 and VL3 each comprise the same CDR1, CDR2 and/or CDR3 sequences (e.g., a CDR1 comprising an amino acid sequence having at least 80%, at least 85%, at least 90%, at least 91%, at least 92%, at least 93%, at least 94%, at least 95%, at least 96%, at least 97%, at least 98%, at least 99% or 100% identity to any one of SEQ ID NOs:43, 51, 59, 67, 75, 171, 179, 187, 264, 272, 280, 288, 513, 521, 529, 537, 545, 553, 561, 569, 577, 585, 593, 601, 609, 617, 639, 647, 656 and 664; a CDR2 comprising an amino acid sequence having at least 80%, at least 85%, at least 90%, at least 91%, at least 92%, at least 93%, at least 94%, at least 95%, at least 96%, at least 97%, at least 98%, at least 99% or 100% identity to any one of SEQ ID NOs:44, 52, 60, 68, 76, 172, 180, 188, 265, 273, 281, 289, 514, 522, 530, 538, 546, 554, 562, 570, 578, 586, 594, 602, 610, 618, 640, 648, 657 and 665; and/or a CDR3 comprising an amino acid sequence having at least 80%, at least 85%, at least 90%, at least 91%, at least 92%, at least 93%, at least 94%, at least 95%, at least 96%, at least 97%, at least 98%, at least 99% or 100% identity to any one of SEQ ID NOs:45, 53, 61, 69, 77, 173, 181, 189, 266, 274, 282, 290, 515, 523, 531, 539, 547, 555, 563, 571, 579, 587, 595, 603, 611, 619, 641, 649, 658 and 666, or any other CDR sequence within a larger VH or full length polypeptide chain sequence disclosed herein). In some preferred aspects, CDR1, CDR2 and CDR3 of each of VH1, VH3, VL1 and VL3 have at least 90% identity with a corresponding amino acid sequence specified above. As used herein, “at least 90% identity” includes at least 91%, 92%, 93%, 94%, 95%, 96%, 97%, 98%, 99% and 100% identity to the recited reference sequence. In some particularly preferred aspects, CDR1, CDR2 and CDR3 of each of VH1, VH3, VL1 and VL3 comprise or consist of a corresponding amino acid sequence specified above.

[0343] In some aspects, VH1 and VH2 each comprise the same CDR1, CDR2 and/or CDR3 sequences (e.g., a CDR1 comprising an amino acid sequence having at least 80%, at least 85%, at least 90%, at least 91%, at least 92%, at least 93%, at least 94%, at least 95%, at least 96%, at least 97%, at least 98%, at least 99% or 100% identity to any one of SEQ ID NOs:43, 51, 59, 67, 75, 171, 179, 187, 264, 272, 280, 288, 513, 521, 529, 537, 545, 553, 561, 569, 577, 585, 593, 601, 609, 617, 639, 647, 656 and 664; a CDR2 comprising an amino acid sequence having at least 80%, at least 85%, at least 90%, at least 91%, at least 92%, at least 93%, at least 94%, at least 95%, at least 96%, at least 97%, at least 98%, at least 99% or 100% identity to any one of SEQ ID NOs:44, 52, 60, 68, 76, 172, 180, 188, 265, 273, 281, 289, 514, 522, 530, 538, 546, 554, 562, 570, 578, 586, 594, 602, 610, 618, 640, 648, 657 and 665; and/or a CDR3 comprising an amino acid sequence having at least 80%, at least 85%, at least 90%, at least 91%, at least 92%, at least 93%, at least 94%, at least 95%, at least 96%, at least 97%, at least 98%, at least 99% or 100% identity to any one of SEQ ID NOs:45, 53, 61, 69, 77, 173, 181, 189, 266, 274, 282, 290, 515, 523, 531, 539, 547, 555, 563, 571, 579, 587, 595, 603, 611, 619, 641, 649, 658 and 666, or any other CDR sequence within a larger VH or full length polypeptide chain sequence disclosed herein), and/or VL1 and VL2 each comprise the same CDR1, CDR2 and/or CDR3 sequences (e.g., a CDR1 comprising an amino acid sequence having at least 80%, at least 85%, at least 90%, at least 91%, at least 92%, at least 93%, at least 94%, at least 95%, at least 96%, at least 97%, at least 98%, at least 99% or 100% identity to any one of SEQ ID NOs:43, 51, 59, 67, 75, 171, 179, 187, 264, 272, 280, 288, 513, 521, 529, 537, 545, 553, 561, 569, 577, 585, 593, 601, 609, 617, 639, 647, 656 and 664; a CDR2 comprising an amino acid sequence having at least 80%, at least 85%, at least 90%, at least 91%, at least 92%, at least 93%, at least 94%, at least 95%, at least 96%, at least 97%, at least 98%, at least 99% or 100% identity to any one of SEQ ID NOs:44, 52, 60, 68, 76, 172, 180, 188, 265, 273, 281, 289, 514, 522, 530, 538, 546, 554, 562, 570, 578, 586, 594, 602, 610, 618, 640, 648, 657 and 665; and/or a CDR3 comprising an amino acid sequence having at least 80%, at least 85%, at least 90%, at least 91%, at least 92%, at least 93%, at least 94%, at least 95%, at least 96%, at least 97%, at least 98%, at least 99% or 100% identity to any one of SEQ ID NOs:45, 53, 61, 69, 77, 173, 181, 189, 266, 274, 282, 290, 515, 523, 531, 539, 547, 555, 563, 571, 579, 587, 595, 603, 611, 619, 641, 649, 658 and 666, or any other CDR sequence within a larger VH or full length polypeptide chain sequence disclosed herein). In some preferred aspects, CDR1, CDR2 and CDR3 of each of VH1, VH2, VL1 and VL2 have at least 90% identity with a corresponding amino acid sequence specified above. As used herein, “at least 90% identity” includes at least 91%, 92%, 93%, 94%, 95%, 96%, 97%, 98%, 99% and 100% identity to the recited reference sequence. In some particularly preferred aspects, CDR1, CDR2 and CDR3 of each of VH1, VH2, VL1 and VL2 comprise or consist of a corresponding amino acid sequence specified above.

[0344] In some aspects, VH2 and VH3 each comprise the same CDR1, CDR2 and/or CDR3 sequences (e.g., a CDR1 comprising an amino acid sequence having at least 80%, at least 85%, at least 90%, at least 91%, at least 92%, at least 93%, at least 94%, at least 95%, at least 96%, at least 97%, at least 98%, at least 99% or 100% identity to any one of SEQ ID NOs:43, 51, 59, 67, 75, 171, 179, 187, 264, 272, 280, 288, 513, 521, 529, 537, 545, 553, 561, 569, 577, 585, 593, 601, 609, 617, 639, 647, 656 and 664; a CDR2 comprising an amino acid sequence having at least 80%, at least 85%, at least 90%, at least 91%, at least 92%, at least 93%, at least 94%, at least 95%, at least 96%, at least 97%, at least 98%, at least 99% or 100% identity to any one of SEQ ID NOs:44, 52, 60, 68, 76, 172, 180, 188, 265, 273, 281, 289, 514, 522, 530, 538, 546, 554, 562, 570, 578, 586, 594, 602, 610, 618, 640, 648, 657 and 665; and/or a CDR3 comprising an amino acid sequence having at least 80%, at least 85%, at least 90%, at least 91%, at least 92%, at least 93%, at least 94%, at least 95%, at least 96%, at least 97%, at least 98%, at least 99% or 100% identity to any one of SEQ ID NOs:45, 53, 61, 69, 77, 173, 181, 189, 266, 274, 282, 290, 515, 523, 531, 539, 547, 555, 563, 571, 579, 587, 595, 603, 611, 619, 641, 649, 658 and 666, or any other CDR sequence within a larger VH or full length polypeptide chain sequence disclosed herein), and/or VL2 and VL3 each comprise the same CDR1, CDR2 and/or CDR3 sequences (e.g., a CDR1 comprising an amino acid sequence having at least 80%, at least 85%, at least 90%, at least 91%, at least 92%, at least 93%, at least 94%, at least 95%, at least 96%, at least 97%, at least 98%, at least 99% or 100% identity to any one of SEQ ID NOs:43, 51, 59, 67, 75, 171, 179, 187, 264, 272, 280, 288, 513, 521, 529, 537, 545, 553, 561, 569, 577, 585, 593, 601, 609, 617, 639, 647, 656 and 664; a CDR2 comprising an amino acid sequence having at least 80%, at least 85%, at least 90%, at least 91%, at least 92%, at least 93%, at least 94%, at least 95%, at least 96%, at least 97%, at least 98%, at least 99% or 100% identity to any one of SEQ ID NOs:44, 52, 60, 68, 76, 172, 180, 188, 265, 273, 281, 289, 514, 522, 530, 538, 546, 554, 562, 570, 578, 586, 594, 602, 610, 618, 640, 648, 657 and 665; and/or a CDR3 comprising an amino acid sequence having at least 80%, at least 85%, at least 90%, at least 91%, at least 92%, at least 93%, at least 94%, at least 95%, at least 96%, at least 97%, at least 98%, at least 99% or 100% identity to any one of SEQ ID NOs:45, 53, 61, 69, 77, 173, 181, 189, 266, 274, 282, 290, 515, 523, 531, 539, 547, 555, 563, 571, 579, 587, 595, 603, 611, 619, 641, 649, 658 and 666, or any other CDR sequence within a larger VH or full length polypeptide chain sequence disclosed herein). In some preferred aspects, CDR1, CDR2 and CDR3 of each of VH2, VH3, VL2 and VL3 have at least 90% identity with a corresponding amino acid sequence specified above. As used herein, “at least 90% identity” includes at least 91%, 92%, 93%, 94%, 95%, 96%, 97%, 98%, 99% and 100% identity to the recited reference sequence. In some particularly preferred aspects, CDR1, CDR2 and CDR3 of each of VH2, VH3, VL2 and VL3 comprise or consist of a corresponding amino acid sequence specified above.

[0345] In some aspects, VH1, VH2 and VH3 each comprise the same CDR1, CDR2 and/or CDR3 sequences (e.g., a CDR1 comprising an amino acid sequence having at least 80%, at least 85%, at least 90%, at least 91%, at least 92%, at least 93%, at least 94%, at least 95%, at least 96%, at least 97%, at least 98%, at least 99% or 100% identity to any one of SEQ ID NOs:43, 51, 59, 67, 75, 171, 179, 187, 264, 272, 280, 288, 513, 521, 529, 537, 545, 553, 561, 569, 577, 585, 593, 601, 609, 617, 639, 647, 656 and 664; a CDR2 comprising an amino acid sequence having at least 80%, at least 85%, at least 90%, at least 91%, at least 92%, at least 93%, at least 94%, at least 95%, at least 96%, at least 97%, at least 98%, at least 99% or 100% identity to any one of SEQ ID NOs:44, 52, 60, 68, 76, 172, 180, 188, 265, 273, 281, 289, 514, 522, 530, 538, 546, 554, 562, 570, 578, 586, 594, 602, 610, 618, 640, 648, 657 and 665; and/or a CDR3 comprising an amino acid sequence having at least 80%, at least 85%, at least 90%, at least 91%, at least 92%, at least 93%, at least 94%, at least 95%, at least 96%, at least 97%, at least 98%, at least 99% or 100% identity to any one of SEQ ID NOs:45, 53, 61, 69, 77, 173, 181, 189, 266, 274, 282, 290, 515, 523, 531, 539, 547, 555, 563, 571, 579, 587, 595, 603, 611, 619, 641, 649, 658 and 666, or any other CDR sequence within a larger VH or full length polypeptide chain sequence disclosed herein), and VL1, VL2 and VL3 each comprise the same CDR1, CDR2 and/or CDR3 sequences (e.g., a CDR1 comprising an amino acid sequence having at least 80%, at least 85%, at least 90%, at least 91%, at least 92%, at least 93%, at least 94%, at least 95%, at least 96%, at least 97%, at least 98%, at least 99% or 100% identity to any one of SEQ ID NOs:43, 51, 59, 67, 75, 171, 179, 187, 264, 272, 280, 288, 513, 521, 529, 537, 545, 553, 561, 569, 577, 585, 593, 601, 609, 617, 639, 647, 656 and 664; a CDR2 comprising an amino acid sequence having at least 80%, at least 85%, at least 90%, at least 91%, at least 92%, at least 93%, at least 94%, at least 95%, at least 96%, at least 97%, at least 98%, at least 99% or 100% identity to any one of SEQ ID NOs:44, 52, 60, 68, 76, 172, 180, 188, 265, 273, 281, 289, 514, 522, 530, 538, 546, 554, 562, 570, 578, 586, 594, 602, 610, 618, 640, 648, 657 and 665; and/or a CDR3 comprising an amino acid sequence having at least 80%, at least 85%, at least 90%, at least 91%, at least 92%, at least 93%, at least 94%, at least 95%, at least 96%, at least 97%, at least 98%, at least 99% or 100% identity to any one of SEQ ID NOs:45, 53, 61, 69, 77, 173, 181, 189, 266, 274, 282, 290, 515, 523, 531, 539, 547, 555, 563, 571, 579, 587, 595, 603, 611, 619, 641, 649, 658 and 666, or any other CDR sequence within a larger VH or full length polypeptide chain sequence disclosed herein). In some preferred aspects, CDR1, CDR2 and CDR3 of each of VH1, VH2, VH3, VL1, VL2 and VL3 have at least 90% identity with a corresponding amino acid sequence specified above. As used herein, “at least 90% identity” includes at least 91%, 92%, 93%, 94%, 95%, 96%, 97%, 98%, 99% and 100% identity to the recited reference sequence. In some particularly preferred aspects, CDR1, CDR2 and CDR3 of each of VH1, VH2, VH3, VL1, VL2 and VL3 comprise or consist of a corresponding amino acid sequence specified above

[0346] In some aspects, VH1, VH2 and VH3 each comprise different CDR1, CDR2 and/or CDR3 sequences (e.g., a CDR1 comprising an amino acid sequence having at least 80%, at least 85%, at least 90%, at least 91%, at least 92%, at least 93%, at least 94%, at least 95%, at least 96%, at least 97%, at least 98%, at least 99% or 100% identity to any one of SEQ ID NOs:43, 51, 59, 67, 75, 171, 179, 187, 264, 272, 280, 288, 513, 521, 529, 537, 545, 553, 561, 569, 577, 585, 593, 601, 609, 617, 639, 647, 656 and 664; a CDR2 comprising an amino acid sequence having at least 80%, at least 85%, at least 90%, at least 91%, at least 92%, at least 93%, at least 94%, at least 95%, at least 96%, at least 97%, at least 98%, at least 99% or 100% identity to any one of SEQ ID NOs:44, 52, 60, 68, 76, 172, 180, 188, 265, 273, 281, 289, 514, 522, 530, 538, 546, 554, 562, 570, 578, 586, 594, 602, 610, 618, 640, 648, 657 and 665; and/or a CDR3 comprising an amino acid sequence having at least 80%, at least 85%, at least 90%, at least 91%, at least 92%, at least 93%, at least 94%, at least 95%, at least 96%, at least 97%, at least 98%, at least 99% or 100% identity to any one of SEQ ID NOs:45, 53, 61, 69, 77, 173, 181, 189, 266, 274, 282, 290, 515, 523, 531, 539, 547, 555, 563, 571, 579, 587, 595, 603, 611, 619, 641, 649, 658 and 666, or any other CDR sequence within a larger VH or full length polypeptide chain sequence disclosed herein), and VL1, VL2 and VL3 each comprise different CDR1, CDR2 and/or CDR3 sequences (e.g., a CDR1 comprising an amino acid sequence having at least 80%, at least 85%, at least 90%, at least 91%, at least 92%, at least 93%, at least 94%, at least 95%, at least 96%, at least 97%, at least 98%, at least 99% or 100% identity to any one of SEQ ID NOs:43, 51, 59, 67, 75, 171, 179, 187, 264, 272, 280, 288, 513, 521, 529, 537, 545, 553, 561, 569, 577, 585, 593, 601, 609, 617, 639, 647, 656 and 664; a CDR2 comprising an amino acid sequence having at least 80%, at least 85%, at least 90%, at least 91%, at least 92%, at least 93%, at least 94%, at least 95%, at least 96%, at least 97%, at least 98%, at least 99% or 100% identity to any one of SEQ ID NOs:44, 52, 60, 68, 76, 172, 180, 188, 265, 273, 281, 289, 514, 522, 530, 538, 546, 554, 562, 570, 578, 586, 594, 602, 610, 618, 640, 648, 657 and 665; and/or a CDR3 comprising an amino acid sequence having at least 80%, at least 85%, at least 90%, at least 91%, at least 92%, at least 93%, at least 94%, at least 95%, at least 96%, at least 97%, at least 98%, at least 99% or 100% identity to any one of SEQ ID NOs:45, 53, 61, 69, 77, 173, 181, 189, 266, 274, 282, 290, 515, 523, 531, 539, 547, 555, 563, 571, 579, 587, 595, 603, 611, 619, 641, 649, 658 and 666, or any other CDR sequence within a larger VH or full length polypeptide chain sequence disclosed herein). In some preferred aspects, CDR1, CDR2 and CDR3 of each of VH1, VH2, VH3, VL1, VL2 and VL3 have at least 90% identity with a corresponding amino acid sequence specified above. As used herein, “at least 90% identity” includes at least 91%, 92%, 93%, 94%, 95%, 96%, 97%, 98%, 99% and 100% identity to the recited reference sequence. In some particularly preferred aspects, CDR1, CDR2 and CDR3 of each of VH1, VH2, VH3, VL1, VL2 and VL3 comprise or consist of a corresponding amino acid sequence specified above.

[0347] In some aspects, VH1 comprises the same heavy chain variable region as VH3. In some aspects, VL1 comprises the same light chain variable region as VL3. In some aspects, VH1 comprises the same heavy chain variable region as VH3, and VL1 comprises the same light chain variable region as VL3.

[0348] In some aspects, VH1 comprises the same heavy chain variable region as VH2. In some aspects, VL1 comprises the same light chain variable region as VL2. In some aspects, VH1 comprises the same heavy chain variable region as VH2, and VL1 comprises the same light chain variable region as VL2.

[0349] In some aspects, VH2 comprises the same heavy chain variable region as VH3. In some aspects, VL2 comprises the same light chain variable region as VL3. In some aspects, VH2 comprises the same heavy chain variable region as VH3, and VL2 comprises the same light chain variable region as VL3.

[0350] In some aspects, VH1, VH2 and VH3 each comprise the same heavy chain variable region. In some aspects, VL1, VL2 and VL3 each comprise the same light chain variable region. In some aspects, VH1, VH2 and VH3 each comprise the same heavy chain variable region, and VL1, VL2 and VL3 each comprise the same light chain variable region.

[0351] In some aspects, VH1, VH2 and VH3 each comprise different heavy chain variable regions. In some aspects, VL1, VL2 and VL3 each comprise different light chain variable regions. In some aspects, VH1, VH2 and VH3 each comprise different heavy chain variable regions, and VL1, VL2 and VL3 each comprise different light chain variable regions.

[0352] In some aspects, VH1, VH2 and/or VH3 comprise an amino acid sequence having at least 80%, at least 85%, at least 90%, at least 91%, at least 92%, at least 93%, at least 94%, at least 95%, at least 96%, at least 97%, at least 98%, at least 99% or 100% identity to any one of SEQ ID NOs:42, 50, 58, 66, 74, 170, 178, 186, 263, 271, 279, 287, 510, 512, 520, 528, 536, 544, 552, 560, 568, 576, 584, 592, 600, 608, 616, 624, 626, 628, 630, 632, 634, 636, 638, 646, 654, 663, 779, 781, 785 and 787; and/or VL1, VL2 and/or VL3 comprise an amino acid sequence having at least 80%, at least 85%, at least 90%, at least 91%, at least 92%, at least 93%, at least 94%, at least 95%, at least 96%, at least 97%, at least 98%, at least 99% or 100% identity to any one of SEQ ID NOs:38, 46, 54, 62, 70, 166, 174, 182, 259, 267, 275, 283, 508, 509, 511, 516, 524, 532, 540, 548, 556, 564, 572, 580, 588, 596, 604, 612, 620, 625, 627, 629, 631, 633, 635, 637, 642, 650, 659 and 667. In some preferred aspects, VH1, VH2, VH3, VL1, VL2 and VL3 have at least 90% identity with the corresponding amino acid sequences specified above. In some particularly preferred aspects, VH1, VH2, VH3, VL1, VL2 and VL3 comprise or consist of the corresponding amino acid sequences specified above. As used herein, “at least 90% identity” includes at least 91%, 92%, 93%, 94%, 95%, 96%, 97%, 98%, 99% and 100% identity to the recited reference sequence.

[0353] In some aspects, an antigen binding polypeptide provided herein has a structure represented by VL1-L1-VH1 or VH1-L2-VL1; wherein VL1 is a first immunoglobulin light chain variable region that specifically binds to a severe acute respiratory syndrome coronavirus 2 (SARS-CoV-2) protein; VH1 is a first immunoglobulin heavy chain variable region that specifically binds to a SARS-CoV-2 protein; and L1 and L2 are amino acid linkers.

[0354] In some aspects, an antigen binding polypeptide provided herein has a structure represented by VL1-L1-VL2-L2-VH2-L3-VH1; VL1-L1-VH2-L2-VL2-L3-VH1; VH1-L4-VH2-L5-VL2-L6-VL1; or VH1-L4-VL2-L5-VH2-L6-VL1; wherein VL1 is a first immunoglobulin light chain variable region that specifically binds to a SARS-CoV-2 protein; VL2 is a second immunoglobulin light chain variable region that specifically binds to a SARS-CoV-2 protein; VH1 is a first immunoglobulin heavy chain variable region that specifically binds to a SARS-CoV-2 protein; VH2 is a second immunoglobulin heavy chain variable region that specifically binds to a SARS-CoV-2 protein; and L1-L6 are amino acid linkers. In some aspects, the antigen binding polypeptide further comprises an Fc region, CH1 region, CL region, or a combination thereof. In some aspects, the antigen binding polypeptide is part of an antigen binding polypeptide complex provided herein (e.g., antibody or antigen binding fragment thereof).

[0355] In some aspects, an antigen binding polypeptide provided herein has a structure represented by VL1-L1-VL2-L2-VH2-L3-VH1 or VH1-L4-VH2-L5-VL2-L6-VL1; wherein VL1 is a first immunoglobulin light chain variable region that specifically binds to a severe acute respiratory syndrome coronavirus 2 (SARS-CoV-2) protein; VL2 is a second immunoglobulin light chain variable region that specifically binds to a SARS-CoV-2 protein; VH1 is a first immunoglobulin heavy chain variable region that specifically binds to a SARS-CoV-2 protein; VH2 is a second immunoglobulin heavy chain variable region that specifically binds to a SARS-CoV-2 protein; and L1-L6 are amino acid linkers. In some aspects, the antigen binding polypeptide further comprises an Fc region, CH1 region, CL region, or a combination thereof. In some aspects, the antigen binding polypeptide is part of an antigen binding polypeptide complex provided herein (e.g., antibody or antigen binding fragment thereof).

[0356] In some aspects, an antigen binding polypeptide provided herein has a structure represented by VL1-L1-VH2-L2-VL2-L3-VH1 or VH1-L4-VL2-L5-VH2-L6-VL1; wherein VL1 is a first immunoglobulin light chain variable region that specifically binds to a severe acute respiratory syndrome coronavirus 2 (SARS-CoV-2) protein; VL2 is a second immunoglobulin light chain variable region that specifically binds to a SARS-CoV-2 protein; VH1 is a first immunoglobulin heavy chain variable region that specifically binds to a SARS-CoV-2 protein; VH2 is a second immunoglobulin heavy chain variable region that specifically binds to a SARS-CoV-2 protein; and L1-L6 are amino acid linkers. In some aspects, the antigen binding polypeptide further comprises an Fc region, CH1 region, CL region, or a combination thereof. In some aspects, the antigen binding polypeptide is part of an antigen binding polypeptide complex provided herein (e.g., antibody or antigen binding fragment thereof).

[0357] In some aspects, an antigen binding polypeptide complex provided herein comprises a first polypeptide and a second polypeptide; wherein the first polypeptide has a structure represented by VL1-L1-VH1 or VH1-L2-VL1; wherein the second polypeptide has a structure represented by VL2-L3-VH2 or VH2-L4-VL2; wherein VL1 is a first immunoglobulin light chain variable region that specifically binds to a SARS-CoV-2 protein; VH1 is a first immunoglobulin heavy chain variable region that specifically binds to a SARS-CoV-2 protein; wherein VL2 is a second immunoglobulin light chain variable region that specifically binds to a SARS-CoV-2 protein; wherein VH2 is a second immunoglobulin heavy chain variable region that specifically binds to a SARS-CoV-2 protein; and L1-L4 are amino acid linkers. For example, an antigen binding polypeptide complex provided herein comprises a first polypeptide and a second polypeptide; wherein the first polypeptide has a structure represented by VL1-L1-VH1; and wherein the second polypeptide has a structure represented by VL2-L3-VH2 or VH2-L4-V. For example, an antigen binding polypeptide complex provided herein comprises a first polypeptide and a second polypeptide; wherein the first polypeptide has a structure represented by VH1-L2-VL1; wherein the second polypeptide has a structure represented by VL2-L3-VH2 or VH2-L4-V.

[0358] In some aspects, an antigen binding polypeptide complex provided herein comprises a first polypeptide and a second polypeptide; wherein the first polypeptide has a structure represented by VL1-L1-VL2-L2-VH2-L3-VH1; VL1-L1-VH2-L2-VL2-L3-VH1; VH1-L4-VH2-L5-VL2-L6-VL1; or VH1-L4-VL2-L5-VH2-L6-VL1; wherein the second polypeptide has a structure represented by VL3-L7-VL4-L8-VH4-L9-VH3; VL3-L7-VH4-L8-VL4-L9-VH3; VH3-L10-VH4-L11-VL4-L12-VL3; or VH3-L10-VL4-L11-VH4-L12-VL3; wherein VL1 is a first immunoglobulin light chain variable region that specifically binds to a SARS-CoV-2 protein; VL2 is a second immunoglobulin light chain variable region that specifically binds to a SARS-CoV-2 protein; VL3 is a third immunoglobulin light chain variable region that specifically binds to a SARS-CoV-2 protein; VL4 is a fourth immunoglobulin light chain variable region that specifically binds to a SARS-CoV-2 protein; VH1 is a first immunoglobulin heavy chain variable region that specifically binds to a SARS-CoV-2 protein; VH2 is a second immunoglobulin heavy chain variable region that specifically binds to a SARS-CoV-2 protein; VH3 is a third immunoglobulin heavy chain variable region that specifically binds to a SARS-CoV-2 protein; VH4 is a fourth immunoglobulin heavy chain variable region that specifically binds to a SARS-CoV-2 protein; and L1-L12 are amino acid linkers. In some aspects, the antigen binding polypeptide complex further comprises an Fc region, CH1 region, CL region, or a combination thereof in the first and/or second polypeptides. In some aspects, the antigen binding polypeptide complex comprises an antigen binding polypeptide provided herein. In some aspects, the antigen binding polypeptide complex is an antibody or antigen binding fragment thereof. For example, an antigen binding polypeptide complex provided herein comprises a first polypeptide and a second polypeptide; wherein the first polypeptide has a structure represented by VL1-L1-VL2-L2-VH2-L3-VH1; and wherein the second polypeptide has a structure represented by VL3-L7-VL4-L8-VH4-L9-VH3; VL3-L7-VH4-L8-VL4-L9-VH3; VH3-L10-VH4-L11-VL4-L12-VL3; or VH3-L10-VL4-L11-VH4-L12-VL3. For example, an antigen binding polypeptide complex provided herein comprises a first polypeptide and a second polypeptide; wherein the first polypeptide has a structure represented by VL1-L1-VH2-L2-VL2-L3-VH1; and wherein the second polypeptide has a structure represented by VL3-L7-VL4-L8-VH4-L9-VH3; VL3-L7-VH4-L8-VL4-L9-VH3; VH3-L10-VH4-L11-VL4-L12-VL3; or VH3-L10-VL4-L11-VH4-L12-VL3. For example, an antigen binding polypeptide complex provided herein comprises a first polypeptide and a second polypeptide; wherein the first polypeptide has a structure represented by VH1-L4-VH2-L5-VL2-L6-VL1; and wherein the second polypeptide has a structure represented by VL3-L7-VL4-L8-VH4-L9-VH3; VL3-L7-VH4-L8-VL4-L9-VH3; VH3-L10-VH4-L11-VL4-L12-VL3; or VH3-L10-VL4-L11-VH4-L12-VL3. For example, an antigen binding polypeptide complex provided herein comprises a first polypeptide and a second polypeptide; wherein the first polypeptide has a structure represented by VH1-L4-VL2-L5-VH2-L6-VL1; and wherein the second polypeptide has a structure represented by VL3-L7-VL4-L8-VH4-L9-VH3; VL3-L7-VH4-L8-VL4-L9-VH3; VH3-L10-VH4-L11-VL4-L12-VL3; or VH3-L10-VL4-L11-VH4-L12-VL3. In each example, the first polypeptide may further comprise an Fc region. In each example, the second polypeptide may further comprise an Fc region. In each example, the first polypeptide and the second polypeptide may further comprise an Fc region. Alternatively or in addition, in each example, the first polypeptide may further comprise an CH1 region. In each example, the second polypeptide may further comprise an CH1 region. In each example, the first polypeptide and the second polypeptide may further comprise an CH1 region. Alternatively or in addition, in each example, the first polypeptide may further comprise an CL region. In each example, the second polypeptide may further comprise an CL region. In each example, the first polypeptide and the second polypeptide may further comprise an CL region.

[0359] In some aspects, an antigen binding polypeptide complex provided herein comprises a first polypeptide and a second polypeptide; wherein the first polypeptide has a structure represented by VL1-L1-VL2-L2-VH2-L3-VH1 or VH1-L4-VH2-L5-VL2-L6-VL1; wherein the second polypeptide has a structure represented by VL3-L7-VL4-L8-VH4-L9-VH3 or VH3-L10-VH4-L11-VL4-L12-VL3; wherein VL1 is a first immunoglobulin light chain variable region that specifically binds to a SARS-CoV-2 protein; VL2 is a second immunoglobulin light chain variable region that specifically binds to a SARS-CoV-2 protein; VL3 is a third immunoglobulin light chain variable region that specifically binds to a SARS-CoV-2 protein; VL4 is a fourth immunoglobulin light chain variable region that specifically binds to a SARS-CoV-2 protein; VH1 is a first immunoglobulin heavy chain variable region that specifically binds to a SARS-CoV-2 protein; VH2 is a second immunoglobulin heavy chain variable region that specifically binds to a SARS-CoV-2 protein; VH3 is a third immunoglobulin heavy chain variable region that specifically binds to a SARS-CoV-2 protein; VH4 is a fourth immunoglobulin heavy chain variable region that specifically binds to a SARS-CoV-2 protein; and L1-L12 are amino acid linkers. In some aspects, the antigen binding polypeptide complex further comprises an Fc region, CH1 region, CL region, or a combination thereof in the first and/or second polypeptides. In some aspects, the antigen binding polypeptide complex comprises an antigen binding polypeptide provided herein. In some aspects, the antigen binding polypeptide complex is an antibody or antigen binding fragment thereof. For example, an antigen binding polypeptide complex provided herein comprises a first polypeptide and a second polypeptide; wherein the first polypeptide has a structure represented by VL1-L1-VL2-L2-VH2-L3-VH1; and wherein the second polypeptide has a structure represented by VL3-L7-VL4-L8-VH4-L9-VH3 or VH3-L10-VH4-L11-VL4-L12-VL3. For example, an antigen binding polypeptide complex provided herein comprises a first polypeptide and a second polypeptide; wherein the first polypeptide has a structure represented by VH1-L4-VH2-L5-VL2-L6-VL1; and wherein the second polypeptide has a structure represented by VL3-L7-VL4-L8-VH4-L9-VH3 or VH3-L10-VH4-L11-VL4-L12-VL3. In each example, the first polypeptide may further comprise an Fc region. In each example, the second polypeptide may further comprise an Fc region. In each example, the first polypeptide and the second polypeptide may further comprise an Fc region. Alternatively or in addition, in each example, the first polypeptide may further comprise an CH1 region. In each example, the second polypeptide may further comprise an CH1 region. In each example, the first polypeptide and the second polypeptide may further comprise an CH1 region. Alternatively or in addition, in each example, the first polypeptide may further comprise an CL region. In each example, the second polypeptide may further comprise an CL region. In each example, the first polypeptide and the second polypeptide may further comprise an CL region.

[0360] In some aspects, an antigen binding polypeptide complex provided herein comprises a first polypeptide and a second polypeptide; wherein the first polypeptide has a structure represented by VL1-L1-VH2-L2-VL2-L3-VH1 or VH1-L4-VL2-L5-VH2-L6-VL1; wherein the second polypeptide has a structure represented by VL3-L7-VH4-L8-VL4-L9-VH3 or VH3-L10-VL4-L11-VH4-L12-VL3; wherein VL1 is a first immunoglobulin light chain variable region that specifically binds to a SARS-CoV-2 protein; VL2 is a second immunoglobulin light chain variable region that specifically binds to a SARS-CoV-2 protein; VL3 is a third immunoglobulin light chain variable region that specifically binds to a SARS-CoV-2 protein; VL4 is a fourth immunoglobulin light chain variable region that specifically binds to a SARS-CoV-2 protein; VH1 is a first immunoglobulin heavy chain variable region that specifically binds to a SARS-CoV-2 protein; VH2 is a second immunoglobulin heavy chain variable region that specifically binds to a SARS-CoV-2 protein; VH3 is a third immunoglobulin heavy chain variable region that specifically binds to a SARS-CoV-2 protein; VH4 is a fourth immunoglobulin heavy chain variable region that specifically binds to a SARS-CoV-2 protein; and L1-L12 are amino acid linkers. In some aspects, the antigen binding polypeptide complex further comprises an Fc region, CH1 region, CL region, or a combination thereof in the first and/or second polypeptides. In some aspects, the antigen binding polypeptide complex comprises an antigen binding polypeptide provided herein. In some aspects, the antigen binding polypeptide complex is an antibody or antigen binding fragment thereof. For example, an antigen binding polypeptide complex provided herein comprises a first polypeptide and a second polypeptide; wherein the first polypeptide has a structure represented by VL1-L1-VH2-L2-VL2-L3-VH1; and wherein the second polypeptide has a structure represented by VL3-L7-VH4-L8-VL4-L9-VH3 or VH3-L10-VL4-L11-VH4-L12-VL3. For example, an antigen binding polypeptide complex provided herein comprises a first polypeptide and a second polypeptide; wherein the first polypeptide has a structure represented by VH1-L4-VL2-L5-VH2-L6-VL1; and wherein the second polypeptide has a structure represented by VL3-L7-VH4-L8-VL4-L9-VH3 or VH3-L10-VL4-L11-VH4-L12-VL3. In each example, the first polypeptide may further comprise an Fc region. In each example, the second polypeptide may further comprise an Fc region. In each example, the first polypeptide and the second polypeptide may further comprise an Fc region. Alternatively or in addition, in each example, the first polypeptide may further comprise an CH1 region. In each example, the second polypeptide may further comprise an CH1 region. In each example, the first polypeptide and the second polypeptide may further comprise an CH1 region. Alternatively or in addition, in each example, the first polypeptide may further comprise an CL region. In each example, the second polypeptide may further comprise an CL region. In each example, the first polypeptide and the second polypeptide may further comprise an CL region.

[0361] In some aspects, an antigen binding polypeptide provided herein has a structure represented by VL1-L1-VL2-L2-VH2-L3-VH1-L4-Fc; VL1-L1-VH2-L2-VL2-L3-VH1-L4-Fc; VH1-L5-VH2-L6-VL2-L7-VL1-L8-Fc; or VH1-L5-VL2-L6-VH2-L7-VL1-L8-Fc; wherein VL1 is a first immunoglobulin light chain variable region that specifically binds to a SARS-CoV-2 protein; VL2 is a second immunoglobulin light chain variable region that specifically binds to a SARS-CoV-2 protein; VH1 is a first immunoglobulin heavy chain variable region that specifically binds to a SARS-CoV-2 protein; VH2 is a second immunoglobulin heavy chain variable region that specifically binds to a SARS-CoV-2 protein; Fc is a region comprising an immunoglobulin heavy chain constant region 2 (CH2), an immunoglobulin heavy chain constant region 3 (CH3), and optionally, an immunoglobulin hinge; and L1-L8 are amino acid linkers. In some aspects, the antigen binding polypeptide further comprises a CH1 region, CL region, or a combination thereof. In some aspects, the antigen binding polypeptide is part of an antigen binding polypeptide complex provided herein (e.g., an antibody or antigen binding fragment thereof).

[0362] In some aspects, an antigen binding polypeptide provided herein has a structure represented by VL1-L1-VL2-L2-VH2-L3-VH1-L4-Fc or VH1-L5-VH2-L6-VL2-L7-VL1-L8-Fc; wherein VL1 is a first immunoglobulin light chain variable region that specifically binds to a SARS-CoV-2 protein; VL2 is a second immunoglobulin light chain variable region that specifically binds to a SARS-CoV-2 protein; VH1 is a first immunoglobulin heavy chain variable region that specifically binds to a SARS-CoV-2 protein; VH2 is a second immunoglobulin heavy chain variable region that specifically binds to a SARS-CoV-2 protein; Fc is a region comprising an immunoglobulin heavy chain constant region 2 (CH2), an immunoglobulin heavy chain constant region 3 (CH3), and optionally, an immunoglobulin hinge; and L1-L8 are amino acid linkers. In some aspects, the antigen binding polypeptide further comprises a CH1 region, CL region, or a combination thereof. In some aspects, the antigen binding polypeptide is part of an antigen binding polypeptide complex provided herein (e.g., an antibody or antigen binding fragment thereof).

[0363] In some aspects, an antigen binding polypeptide provided herein has a structure represented by VL1-L1-VH2-L2-VL2-L3-VH1-L4-Fc or VH1-L5-VL2-L6-VH2-L7-VL1-L8-Fc; wherein VL1 is a first immunoglobulin light chain variable region that specifically binds to a SARS-CoV-2 protein; VL2 is a second immunoglobulin light chain variable region that specifically binds to a SARS-CoV-2 protein; VH1 is a first immunoglobulin heavy chain variable region that specifically binds to a SARS-CoV-2 protein; VH2 is a second immunoglobulin heavy chain variable region that specifically binds to a SARS-CoV-2 protein; Fc is a region comprising an immunoglobulin heavy chain constant region 2 (CH2), an immunoglobulin heavy chain constant region 3 (CH3), and optionally, an immunoglobulin hinge; and L1-L8 are amino acid linkers. In some aspects, the antigen binding polypeptide further comprises a CH1 region, CL region, or a combination thereof. In some aspects, the antigen binding polypeptide is part of an antigen binding polypeptide complex provided herein (e.g., an antibody or antigen binding fragment thereof).

[0364] In some aspects, an antigen binding polypeptide complex provided herein comprises a first polypeptide and a second polypeptide; wherein the first polypeptide has a structure represented by VL1-L1-VL2-L2-VH2-L3-VH1-L4-Fc; VL1-L1-VH2-L2-VL2-L3-VH1-L4-Fc; VH1-L5-VH2-L6-VL2-L7-VL1-L8-Fc; or VH1-L5-VL2-L6-VH2-L7-VL1-L8-Fc; wherein the second polypeptide has a structure represented by Fc; VL3-L9-VL4-L10-VH4-L11-VH3-L12-Fc; VL3-L9-VH4-L10-VL4-L11-VH3-L12-Fc; VH3-L13-VH4-L14-VL4-L15-VL3-L16-Fc; or VH3-L13-VL4-L14-VH4-L15-VL3-L16-Fc; wherein VL1 is a first immunoglobulin light chain variable region that specifically binds to a SARS-CoV-2 protein; VL2 is a second immunoglobulin light chain variable region that specifically binds to a SARS-CoV-2 protein; VL3 is a third immunoglobulin light chain variable region that specifically binds to a SARS-CoV-2 protein; VL4 is a fourth immunoglobulin light chain variable region that specifically binds to a SARS-CoV-2 protein; VH1 is a first immunoglobulin heavy chain variable region that specifically binds to a SARS-CoV-2 protein; VH2 is a second immunoglobulin heavy chain variable region that specifically binds to a SARS-CoV-2 protein; VH3 is a third immunoglobulin heavy chain variable region that specifically binds to a SARS-CoV-2 protein; VH4 is a fourth immunoglobulin heavy chain variable region that specifically binds to a SARS-CoV-2 protein; Fc is a region comprising an immunoglobulin heavy chain constant region 2 (CH2), an immunoglobulin heavy chain constant region 3 (CH3), and optionally, an immunoglobulin hinge; and L1-L16 are amino acid linkers. In some aspects, the antigen binding polypeptide complex further comprises a CH1 region, CL region, or a combination thereof in the first and/or second polypeptides. In some aspects, the antigen binding polypeptide complex comprises an antigen binding polypeptide provided herein. In some aspects, the antigen binding polypeptide complex is an antibody or antigen binding fragment thereof. For example, an antigen binding polypeptide complex provided herein comprises a first polypeptide and a second polypeptide; wherein the first polypeptide has a structure represented by VL1-L1-VL2-L2-VH2-L3-VH1-L4-Fc; and wherein the second polypeptide has a structure represented by Fc; VL3-L9-VL4-L10-VH4-L11-VH3-L12-Fc; VL3-L9-VH4-L10-VL4-L11-VH3-L12-Fc; VH3-L13-VH4-L14-VL4-L15-VL3-L16-Fc; or VH3-L13-VL4-L14-VH4-L15-VL3-L16-Fc. For example, an antigen binding polypeptide complex provided herein comprises a first polypeptide and a second polypeptide; wherein the first polypeptide has a structure represented by VL1-L1-VH2-L2-VL2-L3-VH1-L4-Fc; and wherein the second polypeptide has a structure represented by Fc; VL3-L9-VL4-L10-VH4-L11-VH3-L12-Fc; VL3-L9-VH4-L10-VL4-L11-VH3-L12-Fc; VH3-L13-VH4-L14-VL4-L15-VL3-L16-Fc; or VH3-L13-VL4-L14-VH4-L15-VL3-L16-Fc. For example, an antigen binding polypeptide complex provided herein comprises a first polypeptide and a second polypeptide; wherein the first polypeptide has a structure represented by VH1-L5-VH2-L6-VL2-L7-VL1-L8-Fc; and wherein the second polypeptide has a structure represented by Fc; VL3-L9-VL4-L10-VH4-L11-VH3-L12-Fc; VL3-L9-VH4-L10-VL4-L11-VH3-L12-Fc; VH3-L13-VH4-L14-VL4-L15-VL3-L16-Fc; or VH3-L13-VL4-L14-VH4-L15-VL3-L16-Fc. For example, an antigen binding polypeptide complex provided herein comprises a first polypeptide and a second polypeptide; wherein the first polypeptide has a structure represented by VH1-L5-VL2-L6-VH2-L7-VL1-L8-Fc; and wherein the second polypeptide has a structure represented by Fc; VL3-L9-VL4-L10-VH4-L11-VH3-L12-Fc; VL3-L9-VH4-L10-VL4-L11-VH3-L12-Fc; VH3-L13-VH4-L14-VL4-L15-VL3-L16-Fc; or VH3-L13-VL4-L14-VH4-L15-VL3-L16-Fc. In each example, the first polypeptide may further comprise an CH1 region. In each example, the second polypeptide may further comprise an CH1 region. In each example, the first polypeptide and the second polypeptide may further comprise an CH1 region. Alternatively or in addition, in each example, the first polypeptide may further comprise an CL region. In each example, the second polypeptide may further comprise an CL region. In each example, the first polypeptide and the second polypeptide may further comprise an CL region.

[0365] In some aspects, an antigen binding polypeptide complex provided herein comprises a first polypeptide and a second polypeptide; wherein the first polypeptide has a structure represented by VL1-L1-VL2-L2-VH2-L3-VH1-L4-Fc or VH1-L5-VH2-L6-VL2-L7-VL1-L8-Fc; wherein the second polypeptide has a structure represented by Fc; VL3-L9-VL4-L10-VH4-L11-VH3-L12-Fc; or VH3-L13-VH4-L14-VL4-L15-VL3-L16-Fc; wherein VL1 is a first immunoglobulin light chain variable region that specifically binds to a SARS-CoV-2 protein; VL2 is a second immunoglobulin light chain variable region that specifically binds to a SARS-CoV-2 protein; VL3 is a third immunoglobulin light chain variable region that specifically binds to a SARS-CoV-2 protein; VL4 is a fourth immunoglobulin light chain variable region that specifically binds to a SARS-CoV-2 protein; VH1 is a first immunoglobulin heavy chain variable region that specifically binds to a SARS-CoV-2 protein; VH2 is a second immunoglobulin heavy chain variable region that specifically binds to a SARS-CoV-2 protein; VH3 is a third immunoglobulin heavy chain variable region that specifically binds to a SARS-CoV-2 protein; VH4 is a fourth immunoglobulin heavy chain variable region that specifically binds to a SARS-CoV-2 protein; Fc is a region comprising an immunoglobulin heavy chain constant region 2 (CH2), an immunoglobulin heavy chain constant region 3 (CH3), and optionally, an immunoglobulin hinge; and L1-L16 are amino acid linkers. In some aspects, the antigen binding polypeptide complex further comprises a CH1 region, CL region, or a combination thereof in the first and/or second polypeptides. In some aspects, the antigen binding polypeptide complex comprises an antigen binding polypeptide provided herein. In some aspects, the antigen binding polypeptide complex is an antibody or antigen binding fragment thereof. For example, an antigen binding polypeptide complex provided herein comprises a first polypeptide and a second polypeptide; wherein the first polypeptide has a structure represented by VL1-L1-VL2-L2-VH2-L3-VH1-L4-Fc; and wherein the second polypeptide has a structure represented by Fc; VL3-L9-VL4-L10-VH4-L11-VH3-L12-Fc; or VH3-L13-VH4-L14-VL4-L15-VL3-L16-Fc. For example, an antigen binding polypeptide complex provided herein comprises a first polypeptide and a second polypeptide; wherein the first polypeptide has a structure represented by VH1-L5-VH2-L6-VL2-L7-VL1-L8-Fc; and wherein the second polypeptide has a structure represented by Fc; VL3-L9-VL4-L10-VH4-L11-VH3-L12-Fc; or VH3-L13-VH4-L14-VL4-L15-VL3-L16-Fc. In each example, the first polypeptide may further comprise an CH1 region. In each example, the second polypeptide may further comprise an CH1 region. In each example, the first polypeptide and the second polypeptide may further comprise an CH1 region. Alternatively or in addition, in each example, the first polypeptide may further comprise an CL region. In each example, the second polypeptide may further comprise an CL region. In each example, the first polypeptide and the second polypeptide may further comprise an CL region.

[0366] In some aspects, an antigen binding polypeptide complex provided herein comprises a first polypeptide and a second polypeptide; wherein the first polypeptide has a structure represented by VL1-L1-VH2-L2-VL2-L3-VH1-L4-Fc or VH1-L5-VL2-L6-VH2-L7-VL1-L8-Fc; wherein the second polypeptide has a structure represented by Fc; VL3-L9-VH4-L10-VL4-L11-VH3-L12-Fc; or VH3-L13-VL4-L14-VH4-L15-VL3-L16-Fc; wherein VL1 is a first immunoglobulin light chain variable region that specifically binds to a SARS-CoV-2 protein; VL2 is a second immunoglobulin light chain variable region that specifically binds to a SARS-CoV-2 protein; VL3 is a third immunoglobulin light chain variable region that specifically binds to a SARS-CoV-2 protein; VL4 is a fourth immunoglobulin light chain variable region that specifically binds to a SARS-CoV-2 protein; VH1 is a first immunoglobulin heavy chain variable region that specifically binds to a SARS-CoV-2 protein; VH2 is a second immunoglobulin heavy chain variable region that specifically binds to a SARS-CoV-2 protein; VH3 is a third immunoglobulin heavy chain variable region that specifically binds to a SARS-CoV-2 protein; VH4 is a fourth immunoglobulin heavy chain variable region that specifically binds to a SARS-CoV-2 protein; Fc is a region comprising an immunoglobulin heavy chain constant region 2 (CH2), an immunoglobulin heavy chain constant region 3 (CH3), and optionally, an immunoglobulin hinge; and L1-L16 are amino acid linkers. In some aspects, the antigen binding polypeptide complex further comprises a CH1 region, CL region, or a combination thereof in the first and/or second polypeptides. In some aspects, the antigen binding polypeptide complex comprises an antigen binding polypeptide provided herein. In some aspects, the antigen binding polypeptide complex is an antibody or antigen binding fragment thereof. For example, an antigen binding polypeptide complex provided herein comprises a first polypeptide and a second polypeptide; wherein the first polypeptide has a structure represented by VL1-L1-VH2-L2-VL2-L3-VH1-L4-Fc; wherein the second polypeptide has a structure represented by Fc; VL3-L9-VH4-L10-VL4-L11-VH3-L12-Fc; or VH3-L13-VL4-L14-VH4-L15-VL3-L16-Fc. For example, an antigen binding polypeptide complex provided herein comprises a first polypeptide and a second polypeptide; wherein the first polypeptide has a structure represented by VH1-L5-VL2-L6-VH2-L7-VL1-L8-Fc; wherein the second polypeptide has a structure represented by Fc; VL3-L9-VH4-L10-VL4-L11-VH3-L12-Fc; or VH3-L13-VL4-L14-VH4-L15-VL3-L16-Fc. In each example, the first polypeptide may further comprise an CH1 region. In each example, the second polypeptide may further comprise an CH1 region. In each example, the first polypeptide and the second polypeptide may further comprise an CH1 region. Alternatively or in addition, in each example, the first polypeptide may further comprise an CL region. In each example, the second polypeptide may further comprise an CL region. In each example, the first polypeptide and the second polypeptide may further comprise an CL region.

[0367] In some aspects, an antigen binding polypeptide provided herein has a structure represented by VL1-L1-VL2-L2-VH2-L3-VH1-L4-CH1-L5-CL; VL1-L1-VH2-L2-VL2-L3-VH1-L4-CH1-L5-CL; VH1-L6-VH2-L7-VL2-L8-VL1-L9-CH1-L10-CL; VH1-L6-VL2-L7-VH2-L8-VL1-L9-CH1-L10-CL; VL1-L11-VL2-L12-VH2-L13-VH1-L14-CL-L15-CH1; VL1-L11-VH2-L12-VL2-L13-VH1-L14-CL-L15-CH1; VH1-L16-VH2-L17-VL2-L18-VL1-L19-CL-L20-CH1; or VH1-L16-VL2-L17-VH2-L18-VL1-L19-CL-L20-CH1; wherein VL1 is a first immunoglobulin light chain variable region that specifically binds to a SARS-CoV-2 protein; VL2 is a second immunoglobulin light chain variable region that specifically binds to a SARS-CoV-2 protein; VH1 is a first immunoglobulin heavy chain variable region that specifically binds to a SARS-CoV-2 protein; VH2 is a second immunoglobulin heavy chain variable region that specifically binds to a SARS-CoV-2 protein; CH1 is an immunoglobulin heavy chain constant region 1; CL is an immunoglobulin light chain constant region; and L1-L20 are amino acid linkers. In some aspects, the antigen binding polypeptide further comprises an Fc region. In some aspects, the antigen binding polypeptide is part of an antigen binding polypeptide complex provided herein (e.g., an antibody or antigen binding fragment thereof).

[0368] In some aspects, an antigen binding polypeptide provided herein has a structure represented by VL1-L1-VL2-L2-VH2-L3-VH1-L4-CH1-L5-CL; VH1-L6-VH2-L7-VL2-L8-VL1-L9-CH1-L10-CL; VL1-L11-VL2-L12-VH2-L13-VH1-L14-CL-L15-CH1; or VH1-L16-VH2-L17-VL2-L18-VL1-L19-CL-L20-CH1; wherein VL1 is a first immunoglobulin light chain variable region that specifically binds to a SARS-CoV-2 protein; VL2 is a second immunoglobulin light chain variable region that specifically binds to a SARS-CoV-2 protein; VH1 is a first immunoglobulin heavy chain variable region that specifically binds to a SARS-CoV-2 protein; VH2 is a second immunoglobulin heavy chain variable region that specifically binds to a SARS-CoV-2 protein; CH1 is an immunoglobulin heavy chain constant region 1; CL is an immunoglobulin light chain constant region; and L1-L20 are amino acid linkers. In some aspects, the antigen binding polypeptide further comprises an Fc region. In some aspects, the antigen binding polypeptide is part of an antigen binding polypeptide complex provided herein (e.g., an antibody or antigen binding fragment thereof).

[0369] In some aspects, an antigen binding polypeptide provided herein has a structure represented by VL1-L1-VH2-L2-VL2-L3-VH1-L4-CH1-L5-CL; VH1-L6-VL2-L7-VH2-L8-VL1-L9-CH1-L10-CL; VL1-L11-VH2-L12-VL2-L13-VH1-L14-CL-L15-CH1; or VH1-L16-VL2-L17-VH2-L18-VL1-L19-CL-L20-CH1; wherein VL1 is a first immunoglobulin light chain variable region that specifically binds to a SARS-CoV-2 protein; VL2 is a second immunoglobulin light chain variable region that specifically binds to a SARS-CoV-2 protein; VH1 is a first immunoglobulin heavy chain variable region that specifically binds to a SARS-CoV-2 protein; VH2 is a second immunoglobulin heavy chain variable region that specifically binds to a SARS-CoV-2 protein; CH1 is an immunoglobulin heavy chain constant region 1; CL is an immunoglobulin light chain constant region; and L1-L20 are amino acid linkers. In some aspects, the antigen binding polypeptide further comprises an Fc region. In some aspects, the antigen binding polypeptide is part of an antigen binding polypeptide complex provided herein (e.g., an antibody or antigen binding fragment thereof).

[0370] In some aspects, an antigen binding polypeptide complex provided herein comprises a first polypeptide and a second polypeptide; wherein the first polypeptide has a structure represented by: VL1-L1-VL2-L2-VH2-L3-VH1-L4-CH1-L5-CL; VL1-L1-VH2-L2-VL2-L3-VH1-L4-CH1-L5-CL; VH1-L6-VH2-L7-VL2-L8-VL1-L9-CH1-L10-CL; VH1-L6-VL2-L7-VH2-L8-VL1-L9-CH1-L10-CL; VL1-L11-VL2-L12-VH2-L13-VH1-L14-CL-L15-CH1; VL1-L11-VH2-L12-VL2-L13-VH1-L14-CL-L15-CH1; VH1-L16-VH2-L17-VL2-L18-VL1-L19-CL-L20-CH1; or VH1-L16-VL2-L17-VH2-L18-VL1-L19-CL-L20-CH1; wherein the second polypeptide has a structure represented by VL3-L21-VL4-L22-VH4-L23-VH3-L24-CH1-L25-CL; VL3-L21-VH4-L22-VL4-L23-VH3-L24-CH1-L25-CL; VH3-L26-VH4-L27-VL4-L28-VL3-L29-CH1-L30-CL; VH3-L26-VL4-L27-VH4-L28-VL3-L29-CH1-L30-CL; VL3-L31-VL4-L32-VH4-L33-VH3-L34-CL-L35-CH1; VL3-L31-VH4-L32-VL4-L33-VH3-L34-CL-L35-CH1; VH3-L36-VH4-L37-VL4-L38-VL3-L39-CL-L40-CH1; or VH3-L36-VL4-L37-VH4-L38-VL3-L39-CL-L40-CH1; wherein VL1 is a first immunoglobulin light chain variable region that specifically binds to a SARS-CoV-2 protein; VL2 is a second immunoglobulin light chain variable region that specifically binds to a SARS-CoV-2 protein; VL3 is a third immunoglobulin light chain variable region that specifically binds to a SARS-CoV-2 protein; VL4 is a fourth immunoglobulin light chain variable region that specifically binds to a SARS-CoV-2 protein; VH1 is a first immunoglobulin heavy chain variable region that specifically binds to a SARS-CoV-2 protein; VH2 is a second immunoglobulin heavy chain variable region that specifically binds to a SARS-CoV-2 protein; VH3 is a third immunoglobulin heavy chain variable region that specifically binds to a SARS-CoV-2 protein; VH4 is a fourth immunoglobulin heavy chain variable region that specifically binds to a SARS-CoV-2 protein; CH1 is an immunoglobulin heavy chain constant region 1; CL is an immunoglobulin light chain constant region; and L1-L40 are amino acid linkers. In some aspects, the antigen binding polypeptide complex further comprises an Fc region in the first and/or second polypeptides. In some aspects, the antigen binding polypeptide complex comprises an antigen binding polypeptide provided herein. In some aspects, the antigen binding polypeptide complex is an antibody or antigen binding fragment thereof. Any combination of VH1, VH2, VH3 and/or VH4 described above may be used in combination with any combination of VL1, VL2, VL3 and/or VL4 described above. In particular, any first polypeptide described above may be combined with any second polypeptide described above to form an antigen binding polypeptide complex.

[0371] In some aspects, an antigen binding polypeptide complex provided herein comprises a first polypeptide and a second polypeptide; wherein the first polypeptide has a structure represented by VL1-L1-VL2-L2-VH2-L3-VH1-L4-CH1-L5-CL; VH1-L6-VH2-L7-VL2-L8-VL1-L9-CH1-L10-CL; VL1-L11-VL2-L12-VH2-L13-VH1-L14-CL-L15-CH1; or VH1-L16-VH2-L17-VL2-L18-VL1-L19-CL-L20-CH1; wherein the second polypeptide has a structure represented by VL3-L21-VL4-L22-VH4-L23-VH3-L24-CH1-L25-CL; VH3-L26-VH4-L27-VL4-L28-VL3-L29-CH1-L30-CL; VL3-L31-VL4-L32-VH4-L33-VH3-L34-CL-L35-CH1; or VH3-L36-VH4-L37-VL4-L38-VL3-L39-CL-L40-CH1; wherein VL1 is a first immunoglobulin light chain variable region that specifically binds to a SARS-CoV-2 protein; VL2 is a second immunoglobulin light chain variable region that specifically binds to a SARS-CoV-2 protein; VL3 is a third immunoglobulin light chain variable region that specifically binds to a SARS-CoV-2 protein; VL4 is a fourth immunoglobulin light chain variable region that specifically binds to a SARS-CoV-2 protein; VH1 is a first immunoglobulin heavy chain variable region that specifically binds to a SARS-CoV-2 protein; VH2 is a second immunoglobulin heavy chain variable region that specifically binds to a SARS-CoV-2 protein; VH3 is a third immunoglobulin heavy chain variable region that specifically binds to a SARS-CoV-2 protein; VH4 is a fourth immunoglobulin heavy chain variable region that specifically binds to a SARS-CoV-2 protein; CH1 is an immunoglobulin heavy chain constant region 1; CL is an immunoglobulin light chain constant region; and L1-L40 are amino acid linkers. In some aspects, the antigen binding polypeptide complex further comprises an Fc region in the first and/or second polypeptides. In some aspects, the antigen binding polypeptide complex comprises an antigen binding polypeptide provided herein. In some aspects, the antigen binding polypeptide complex is an antibody or antigen binding fragment thereof. Any combination of VH1, VH2, VH3 and/or VH4 described above may be used in combination with any combination of VL1, VL2, VL3 and/or VL4 described above. For example, an antigen binding polypeptide complex provided herein comprises a first polypeptide and a second polypeptide; wherein the first polypeptide has a structure represented by VL1-L1-VL2-L2-VH2-L3-VH1-L4-CH1-L5-CL; wherein the second polypeptide has a structure represented by VL3-L21-VL4-L22-VH4-L23-VH3-L24-CH1-L25-CL; VH3-L26-VH4-L27-VL4-L28-VL3-L29-CH1-L30-CL; VL3-L31-VL4-L32-VH4-L33-VH3-L34-CL-L35-CH1; or VH3-L36-VH4-L37-VL4-L38-VL3-L39-CL-L40-CH1. For example, an antigen binding polypeptide complex provided herein comprises a first polypeptide and a second polypeptide; wherein the first polypeptide has a structure represented by VH1-L6-VH2-L7-VL2-L8-VL1-L9-CH1-L10-CL; wherein the second polypeptide has a structure represented by VL3-L21-VL4-L22-VH4-L23-VH3-L24-CH1-L25-CL; VH3-L26-VH4-L27-VL4-L28-VL3-L29-CH1-L30-CL; VL3-L31-VL4-L32-VH4-L33-VH3-L34-CL-L35-CH1; or VH3-L36-VH4-L37-VL4-L38-VL3-L39-CL-L40-CH1. VH1-L6-VH2-L7-VL2-L8-VL1-L9-CH1-L10-CLVH1-L6-VH2-L7-VL2-L8-VL1-L9-CH1-L10-CL. For example, an antigen binding polypeptide complex provided herein comprises a first polypeptide and a second polypeptide; wherein the first polypeptide has a structure represented by VL1-L11-VL2-L12-VH2-L13-VH1-L14-CL-L15-CH1; wherein the second polypeptide has a structure represented by VL3-L21-VL4-L22-VH4-L23-VH3-L24-CH1-L25-CL; VH3-L26-VH4-L27-VL4-L28-VL3-L29-CH1-L30-CL; VL3-L31-VL4-L32-VH4-L33-VH3-L34-CL-L35-CH1; or VH3-L36-VH4-L37-VL4-L38-VL3-L39-CL-L40-CH1. VH1-L6-VH2-L7-VL2-L8-VL1-L9-CH1-L10-CLVH1-L6-VH2-L7-VL2-L8-VL1-L9-CH1-L10-CL. For example, an antigen binding polypeptide complex provided herein comprises a first polypeptide and a second polypeptide; wherein the first polypeptide has a structure represented by VH1-L16-VH2-L17-VL2-L18-VL1-L19-CL-L20-CH1; wherein the second polypeptide has a structure represented by VL3-L21-VL4-L22-VH4-L23-VH3-L24-CH1-L25-CL; VH3-L26-VH4-L27-VL4-L28-VL3-L29-CH1-L30-CL; VL3-L31-VL4-L32-VH4-L33-VH3-L34-CL-L35-CH1; or VH3-L36-VH4-L37-VL4-L38-VL3-L39-CL-L40-CH1. VH1-L6-VH2-L7-VL2-L8-VL1-L9-CH1-L10-CLVH1-L6-VH2-L7-VL2-L8-VL1-L9-CH1-L10-CL.

[0372] In some aspects, an antigen binding polypeptide complex provided herein comprises a first polypeptide and a second polypeptide; wherein the first polypeptide has a structure represented by VL1-L1-VH2-L2-VL2-L3-VH1-L4-CH1-L5-CL; VH1-L6-VL2-L7-VH2-L8-VL1-L9-CH1-L10-CL; VL1-L11-VH2-L12-VL2-L13-VH1-L14-CL-L15-CH1; or VH1-L16-VL2-L17-VH2-L18-VL1-L19-CL-L20-CH1; wherein the second polypeptide has a structure represented by VL3-L21-VH4-L22-VL4-L23-VH3-L24-CH1-L25-CL; VH3-L26-VL4-L27-VH4-L28-VL3-L29-CH1-L30-CL; VL3-L31-VH4-L32-VL4-L33-VH3-L34-CL-L35-CH1; or VH3-L36-VL4-L37-VH4-L38-VL3-L39-CL-L40-CH1; wherein VL1 is a first immunoglobulin light chain variable region that specifically binds to a SARS-CoV-2 protein; VL2 is a second immunoglobulin light chain variable region that specifically binds to a SARS-CoV-2 protein; VL3 is a third immunoglobulin light chain variable region that specifically binds to a SARS-CoV-2 protein; VL4 is a fourth immunoglobulin light chain variable region that specifically binds to a SARS-CoV-2 protein; VH1 is a first immunoglobulin heavy chain variable region that specifically binds to a SARS-CoV-2 protein; VH2 is a second immunoglobulin heavy chain variable region that specifically binds to a SARS-CoV-2 protein; VH3 is a third immunoglobulin heavy chain variable region that specifically binds to a SARS-CoV-2 protein; VH4 is a fourth immunoglobulin heavy chain variable region that specifically binds to a SARS-CoV-2 protein; CH1 is an immunoglobulin heavy chain constant region 1; CL is an immunoglobulin light chain constant region; and L1-L40 are amino acid linkers. In some aspects, the antigen binding polypeptide complex further comprises an Fc region in the first and/or second polypeptides. In some aspects, the antigen binding polypeptide complex comprises an antigen binding polypeptide provided herein. In some aspects, the antigen binding polypeptide complex is an antibody or antigen binding fragment thereof. Any combination of VH1, VH2, VH3 and/or VH4 described above may be used in combination with any combination of VL1, VL2, VL3 and/or VL4 described above. In particular, any first polypeptide described above may be combined with any second polypeptide described above to form an antigen binding polypeptide complex.

[0373] In some aspects, an antigen binding polypeptide provided herein has a structure represented by VL1-L1-VL2-L2-VH2-L3-VH1-L4-CH1-L5-CL-L6-Fc; VL1-L1-VH2-L2-VL2-L3-VH1-L4-CH1-L5-CL-L6-Fc; VH1-L7-VH2-L8-VL2-L9-VL1-L10-CH1-L11-CL-L12-Fc; VH1-L7-VL2-L8-VH2-L9-VL1-L10-CH1-L11-CL-L12-Fc; VL1-L13-VL2-L14-VH2-L15-VH1-L16-CL-L17-CH1-L18-Fc; VL1-L13-VH2-L14-VL2-L15-VH1-L16-CL-L17-CH1-L18-Fc; VH1-L19-VH2-L20-VL2-L21-VL1-L22-CL-L23-CH1-L24-Fc; or VH1-L19-VL2-L20-VH2-L21-VL1-L22-CL-L23-CH1-L24-Fc; wherein VL1 is a first immunoglobulin light chain variable region that specifically binds to a SARS-CoV-2 protein; VL2 is a second immunoglobulin light chain variable region that specifically binds to a SARS-CoV-2 protein; VH1 is a first immunoglobulin heavy chain variable region that specifically binds to a SARS-CoV-2 protein; VH2 is a second immunoglobulin heavy chain variable region that specifically binds to a SARS-CoV-2 protein; CH1 is an immunoglobulin heavy chain constant region 1; CL is an immunoglobulin light chain constant region; Fc is a region comprising an immunoglobulin heavy chain constant region 2 (CH2), an immunoglobulin heavy chain constant region 3 (CH3), and optionally, an immunoglobulin hinge; and L1-L24 are amino acid linkers. In some aspects, the antigen binding polypeptide is part of an antigen binding polypeptide complex provided herein (e.g., an antibody or antigen binding fragment thereof).

[0374] In some aspects, an antigen binding polypeptide provided herein has a structure represented by VL1-L1-VL2-L2-VH2-L3-VH1-L4-CH1-L5-CL-L6-Fc; VH1-L7-VH2-L8-VL2-L9-VL1-L10-CH1-L11-CL-L12-Fc; VL1-L13-VL2-L14-VH2-L15-VH1-L16-CL-L17-CH1-L18-Fc; or VH1-L19-VH2-L20-VL2-L21-VL1-L22-CL-L23-CH1-L24-Fc; wherein VL1 is a first immunoglobulin light chain variable region that specifically binds to a SARS-CoV-2 protein; VL2 is a second immunoglobulin light chain variable region that specifically binds to a SARS-CoV-2 protein; VH1 is a first immunoglobulin heavy chain variable region that specifically binds to a SARS-CoV-2 protein; VH2 is a second immunoglobulin heavy chain variable region that specifically binds to a SARS-CoV-2 protein; CH1 is an immunoglobulin heavy chain constant region 1; CL is an immunoglobulin light chain constant region; Fc is a region comprising an immunoglobulin heavy chain constant region 2 (CH2), an immunoglobulin heavy chain constant region 3 (CH3), and optionally, an immunoglobulin hinge; and L1-L24 are amino acid linkers. In some aspects, the antigen binding polypeptide is part of an antigen binding polypeptide complex provided herein (e.g., an antibody or antigen binding fragment thereof).

[0375] In some aspects, an antigen binding polypeptide provided herein has a structure represented by VL1-L1-VH2-L2-VL2-L3-VH1-L4-CH1-L5-CL-L6-Fc; VH1-L7-VL2-L8-VH2-L9-VL1-L10-CH1-L11-CL-L12-Fc; VL1-L13-VH2-L14-VL2-L15-VH1-L16-CL-L17-CH1-L18-Fc; or VH1-L19-VL2-L20-VH2-L21-VL1-L22-CL-L23-CH1-L24-Fc; wherein VL1 is a first immunoglobulin light chain variable region that specifically binds to a SARS-CoV-2 protein; VL2 is a second immunoglobulin light chain variable region that specifically binds to a SARS-CoV-2 protein; VH1 is a first immunoglobulin heavy chain variable region that specifically binds to a SARS-CoV-2 protein; VH2 is a second immunoglobulin heavy chain variable region that specifically binds to a SARS-CoV-2 protein; CH1 is an immunoglobulin heavy chain constant region 1; CL is an immunoglobulin light chain constant region; Fc is a region comprising an immunoglobulin heavy chain constant region 2 (CH2), an immunoglobulin heavy chain constant region 3 (CH3), and optionally, an immunoglobulin hinge; and L1-L24 are amino acid linkers. In some aspects, the antigen binding polypeptide is part of an antigen binding polypeptide complex provided herein (e.g., an antibody or antigen binding fragment thereof).

[0376] In some aspects, an antigen binding polypeptide complex provided herein comprises a first polypeptide and a second polypeptide; wherein the first polypeptide has a structure represented by VL1-L1-VL2-L2-VH2-L3-VH1-L4-CH1-L5-CL-L6-Fc; VL1-L1-VH2-L2-VL2-L3-VH1-L4-CH1-L5-CL-L6-Fc; VH1-L7-VH2-L8-VL2-L9-VL1-L10-CH1-L11-CL-L12-Fc; VH1-L7-VL2-L8-VH2-L9-VL1-L10-CH1-L11-CL-L12-Fc; VL1-L13-VL2-L14-VH2-L15-VH1-L16-CL-L17-CH1-L18-Fc; VL1-L13-VH2-L14-VL2-L15-VH1-L16-CL-L17-CH1-L18-Fc; VH1-L19-VH2-L20-VL2-L21-VL1-L22-CL-L23-CH1-L24-Fc; or VH1-L19-VL2-L20-VH2-L21-VL1-L22-CL-L23-CH1-L24-Fc; wherein the second polypeptide has a structure represented by Fc; VL3-L25-VL4-L26-VH4-L27-VH3-L28-CH1-L29-CL-L30-Fc; VL3-L25-VH4-L26-VL4-L27-VH3-L28-CH1-L29-CL-L30-Fc; VH3-L31-VH4-L32-VL4-L33-VL3-L34-CH1-L35-CL-L36-Fc; VH3-L31-VL4-L32-VH4-L33-VL3-L34-CH1-L35-CL-L36-Fc; VL3-L37-VL4-L38-VH4-L39-VH3-L40-CL-L41-CH1-L42-Fc; VL3-L37-VH4-L38-VL4-L39-VH3-L40-CL-L41-CH1-L42-Fc; VH3-L43-VH4-L44-VL4-L45-VL3-L46-CL-L47-CH1-L48-Fc; or VH3-L43-VL4-L44-VH4-L45-VL3-L46-CL-L47-CH1-L48-Fc; wherein VL1 is a first immunoglobulin light chain variable region that specifically binds to a SARS-CoV-2 protein; VL2 is a second immunoglobulin light chain variable region that specifically binds to a SARS-CoV-2 protein; VL3 is a third immunoglobulin light chain variable region that specifically binds to a SARS-CoV-2 protein; VL4 is a fourth immunoglobulin light chain variable region that specifically binds to a SARS-CoV-2 protein; VH1 is a first immunoglobulin heavy chain variable region that specifically binds to a SARS-CoV-2 protein; VH2 is a second immunoglobulin heavy chain variable region that specifically binds to a SARS-CoV-2 protein; VH3 is a third immunoglobulin heavy chain variable region that specifically binds to a SARS-CoV-2 protein; VH4 is a fourth immunoglobulin heavy chain variable region that specifically binds to a SARS-CoV-2 protein; CH1 is an immunoglobulin heavy chain constant region 1; CL is an immunoglobulin light chain constant region; Fc is a region comprising an immunoglobulin heavy chain constant region 2 (CH2), an immunoglobulin heavy chain constant region 3 (CH3), and optionally, an immunoglobulin hinge; and L1-L48 are amino acid linkers. In some aspects, the antigen binding polypeptide complex comprises an antigen binding polypeptide provided herein. In some aspects, the antigen binding polypeptide complex is an antibody or antigen binding fragment thereof. Any combination of VH1, VH2, VH3 and/or VH4 described above may be used in combination with any combination of VL1, VL2, VL3 and/or VL4 described above. In particular, any first polypeptide described above may be combined with any second polypeptide described above to form an antigen binding polypeptide complex.

[0377] In some aspects, an antigen binding polypeptide complex provided herein comprises a first polypeptide and a second polypeptide; wherein the first polypeptide has a structure represented by VL1-L1-VL2-L2-VH2-L3-VH1-L4-CH1-L5-CL-L6-Fc; VH1-L7-VH2-L8-VL2-L9-VL1-L10-CH1-L11-CL-L12-Fc; VL1-L13-VL2-L14-VH2-L15-VH1-L16-CL-L17-CH1-L18-Fc; or VH1-L19-VH2-L20-VL2-L21-VL1-L22-CL-L23-CH1-L24-Fc; wherein the second polypeptide has a structure represented by Fc; VL3-L25-VL4-L26-VH4-L27-VH3-L28-CH1-L29-CL-L30-Fc; VH3-L31-VH4-L32-VL4-L33-VL3-L34-CH1-L35-CL-L36-Fc; VL3-L37-VL4-L38-VH4-L39-VH3-L40-CL-L41-CH1-L42-Fc; or VH3-L43-VH4-L44-VL4-L45-VL3-L46-CL-L47-CH1-L48-Fc; wherein VL1 is a first immunoglobulin light chain variable region that specifically binds to a SARS-CoV-2 protein; VL2 is a second immunoglobulin light chain variable region that specifically binds to a SARS-CoV-2 protein; VL3 is a third immunoglobulin light chain variable region that specifically binds to a SARS-CoV-2 protein; VL4 is a fourth immunoglobulin light chain variable region that specifically binds to a SARS-CoV-2 protein; VH1 is a first immunoglobulin heavy chain variable region that specifically binds to a SARS-CoV-2 protein; VH2 is a second immunoglobulin heavy chain variable region that specifically binds to a SARS-CoV-2 protein; VH3 is a third immunoglobulin heavy chain variable region that specifically binds to a SARS-CoV-2 protein; VH4 is a fourth immunoglobulin heavy chain variable region that specifically binds to a SARS-CoV-2 protein; CH1 is an immunoglobulin heavy chain constant region 1; CL is an immunoglobulin light chain constant region; Fc is a region comprising an immunoglobulin heavy chain constant region 2 (CH2), an immunoglobulin heavy chain constant region 3 (CH3), and optionally, an immunoglobulin hinge; and L1-L48 are amino acid linkers. In some aspects, the antigen binding polypeptide complex comprises an antigen binding polypeptide provided herein. In some aspects, the antigen binding polypeptide complex is an antibody or antigen binding fragment thereof. Any combination of VH1, VH2, VH3 and/or VH4 described above may be used in combination with any combination of VL1, VL2, VL3 and/or VL4 described above. In particular, any first polypeptide described above may be combined with any second polypeptide described above to form an antigen binding polypeptide complex.

[0378] In some aspects, an antigen binding polypeptide complex provided herein comprises a first polypeptide and a second polypeptide; wherein the first polypeptide has a structure represented by VL1-L1-VH2-L2-VL2-L3-VH1-L4-CH1-L5-CL-L6-Fc; VH1-L7-VL2-L8-VH2-L9-VL1-L10-CH1-L11-CL-L12-Fc; VL1-L13-VH2-L14-VL2-L15-VH1-L16-CL-L17-CH1-L18-Fc; or VH1-L19-VL2-L20-VH2-L21-VL1-L22-CL-L23-CH1-L24-Fc; wherein the second polypeptide has a structure represented by Fc; VL3-L25-VH4-L26-VL4-L27-VH3-L28-CH1-L29-CL-L30-Fc; VH3-L31-VL4-L32-VH4-L33-VL3-L34-CH1-L35-CL-L36-Fc; VL3-L37-VH4-L38-VL4-L39-VH3-L40-CL-L41-CH1-L42-Fc; or VH3-L43-VL4-L44-VH4-L45-VL3-L46-CL-L47-CH1-L48-Fc; wherein VL1 is a first immunoglobulin light chain variable region that specifically binds to a SARS-CoV-2 protein; VL2 is a second immunoglobulin light chain variable region that specifically binds to a SARS-CoV-2 protein; VL3 is a third immunoglobulin light chain variable region that specifically binds to a SARS-CoV-2 protein; VL4 is a fourth immunoglobulin light chain variable region that specifically binds to a SARS-CoV-2 protein; VH1 is a first immunoglobulin heavy chain variable region that specifically binds to a SARS-CoV-2 protein; VH2 is a second immunoglobulin heavy chain variable region that specifically binds to a SARS-CoV-2 protein; VH3 is a third immunoglobulin heavy chain variable region that specifically binds to a SARS-CoV-2 protein; VH4 is a fourth immunoglobulin heavy chain variable region that specifically binds to a SARS-CoV-2 protein; CH1 is an immunoglobulin heavy chain constant region 1; CL is an immunoglobulin light chain constant region; Fc is a region comprising an immunoglobulin heavy chain constant region 2 (CH2), an immunoglobulin heavy chain constant region 3 (CH3), and optionally, an immunoglobulin hinge; and L1-L48 are amino acid linkers. In some aspects, the antigen binding polypeptide complex comprises an antigen binding polypeptide provided herein. In some aspects, the antigen binding polypeptide complex is an antibody or antigen binding fragment thereof. Any combination of VH1, VH2, VH3 and/or VH4 described above may be used in combination with any combination of VL1, VL2, VL3 and/or VL4 described above. In particular, any first polypeptide described above may be combined with any second polypeptide described above to form an antigen binding polypeptide complex.

[0379] In some aspects, one or more of VH1, VH2, VH3 and VH4 comprises a CDR1 comprising an amino acid sequence having at least 80%, at least 85%, at least 90%, at least 91%, at least 92%, at least 93%, at least 94%, at least 95%, at least 96%, at least 97%, at least 98%, at least 99% or 100% identity to any one of SEQ ID NOs:43, 51, 59, 67, 75, 171, 179, 187, 264, 272, 280, 288, 513, 521, 529, 537, 545, 553, 561, 569, 577, 585, 593, 601, 609, 617, 639, 647, 656 and 664; a CDR2 comprising an amino acid sequence having at least 80%, at least 85%, at least 90%, at least 91%, at least 92%, at least 93%, at least 94%, at least 95%, at least 96%, at least 97%, at least 98%, at least 99% or 100% identity to any one of SEQ ID NOs:44, 52, 60, 68, 76, 172, 180, 188, 265, 273, 281, 289, 514, 522, 530, 538, 546, 554, 562, 570, 578, 586, 594, 602, 610, 618, 640, 648, 657 and 665; and/or a CDR3 comprising an amino acid sequence having at least 80%, at least 85%, at least 90%, at least 91%, at least 92%, at least 93%, at least 94%, at least 95%, at least 96%, at least 97%, at least 98%, at least 99% or 100% identity to any one of SEQ ID NOs:45, 53, 61, 69, 77, 173, 181, 189, 266, 274, 282, 290, 515, 523, 531, 539, 547, 555, 563, 571, 579, 587, 595, 603, 611, 619, 641, 649, 658 and 666, or any other CDR sequence within a larger VH or full length polypeptide chain sequence disclosed herein. In some preferred aspects, CDR1, CDR2 and CDR3 of one or more of VH1, VH2, VH3 and VH4 have at least 90% identity with the corresponding amino acid sequences specified above. As used herein, “at least 90% identity” includes at least 91%, 92%, 93%, 94%, 95%, 96%, 97%, 98%, 99% and 100% identity to the recited reference sequence. In some particularly preferred aspects, CDR1, CDR2 and CDR3 of one or more of VH1, VH2, VH3 and VH4 comprise or consist of the corresponding amino acid sequences specified above. In some preferred aspects, CDR1, CDR2 and CDR3 of VH1, VH2, VH3 and VH4 have at least 90% identity with the corresponding amino acid sequences specified above. As used herein, “at least 90% identity” includes at least 91%, 92%, 93%, 94%, 95%, 96%, 97%, 98%, 99% and 100% identity to the recited reference sequence. In some particularly preferred aspects, CDR1, CDR2 and CDR3 of VH1, VH2, VH3 and VH4 comprise or consist of the corresponding amino acid sequences specified above.

[0380] In some aspects, one or more of VL1, VL2, VL3 and VL4 comprises a CDR1 comprising an amino acid sequence having at least 80%, at least 85%, at least 90%, at least 91%, at least 92%, at least 93%, at least 94%, at least 95%, at least 96%, at least 97%, at least 98%, at least 99% or 100% identity to any one of SEQ ID NOs:39, 47, 55, 63, 71, 167, 175, 183, 260, 268, 276, 284, 517, 525, 533, 541, 549, 557, 565, 573, 581, 589, 597, 605, 613, 621, 643, 651, 660 and 668; a CDR2 comprising an amino acid sequence having at least 80%, at least 85%, at least 90%, at least 91%, at least 92%, at least 93%, at least 94%, at least 95%, at least 96%, at least 97%, at least 98%, at least 99% or 100% identity to any one of SEQ ID NOs:40, 48, 56, 64, 72, 168, 176, 184, 261, 269, 277 (having the sequence of LGS), 285, 518 (having the sequence of DAS), 526 (having the sequence of DVS), 534 (having the sequence of EDS), 542 (having the sequence of KDS), 550 (having the sequence of DAS), 558 (having the sequence of AAS), 566 (having the sequence of GAS), 574 (having the sequence of DDS), 582 (having the sequence of KDS), 590 (having the sequence of SAS), 598 (having the sequence of SAS), 606 (having the sequence of GAS), 614 (having the sequence of GAS), 622 (having the sequence of GAS), 644 (having the sequence of GAS), 652 (having the sequence of SAS), 661 (having the sequence of GAS) and 669 (having the sequence of DAS); and/or a CDR3 comprising an amino acid sequence having at least 80%, at least 85%, at least 90%, at least 91%, at least 92%, at least 93%, at least 94%, at least 95%, at least 96%, at least 97%, at least 98%, at least 99% or 100% identity to any one of SEQ ID NOs:41, 49, 57, 65, 73, 169, 177, 185, 262, 270, 278, 286, 519, 527, 535, 543, 551, 559, 567, 575, 583, 591, 599, 607, 615, 623, 645, 653, 662 and 670, or any other CDR sequence within a larger VL or full length polypeptide chain sequence disclosed herein. In some preferred aspects, CDR1, CDR2 and CDR3 of one or more of VL1, VL2, VL3 and VL4 have at least 90% identity with the corresponding amino acid sequences specified above. As used herein, “at least 90% identity” includes at least 91%, 92%, 93%, 94%, 95%, 96%, 97%, 98%, 99% and 100% identity to the recited reference sequence. In some particularly preferred aspects, CDR1, CDR2 and CDR3 of one or more of VL1, VL2, VL3 and VL4 comprise or consist of the corresponding amino acid sequences specified above. In some preferred aspects, CDR1, CDR2 and CDR3 of VL1, VL2, VL3 and VL4 have at least 90% identity with the corresponding amino acid sequences specified above. As used herein, “at least 90% identity” includes at least 91%, 92%, 93%, 94%, 95%, 96%, 97%, 98%, 99% and 100% identity to the recited reference sequence. In some particularly preferred aspects, CDR1, CDR2 and CDR3 of VL1, VL2, VL3 and VL4 comprise or consist of the corresponding amino acid sequences specified above.

[0381] In some aspects, one or more of VH1, VH2, VH3 and VH4 comprises a CDR1 comprising an amino acid sequence having at least 80%, at least 85%, at least 90%, at least 91%, at least 92%, at least 93%, at least 94%, at least 95%, at least 99% or 100% identity to any one of SEQ ID NOs:43, 51, 59, 67, 75, 171, 179, 187, 264, 272, 280, 288, 513, 521, 529, 537, 545, 553, 561, 569, 577, 585, 593, 601, 609, 617, 639, 647, 656 and 664; a CDR2 comprising an amino acid sequence having at least 80%, at least 85%, at least 90%, at least 91%, at least 92%, at least 93%, at least 94%, at least 95%, at least 96%, at least 97%, at least 98%, at least 99% or 100% identity to any one of SEQ ID NOs:44, 52, 60, 68, 76, 172, 180, 188, 265, 273, 281, 289, 514, 522, 530, 538, 546, 554, 562, 570, 578, 586, 594, 602, 610, 618, 640, 648, 657 and 665; and/or a CDR3 comprising an amino acid sequence having at least 80%, at least 85%, at least 90%, at least 91%, at least 92%, at least 93%, at least 94%, at least 95%, at least 96%, at least 97%, at least 98%, at least 99% or 100% identity to any one of SEQ ID NOs:45, 53, 61, 69, 77, 173, 181, 189, 266, 274, 282, 290, 515, 523, 531, 539, 547, 555, 563, 571, 579, 587, 595, 603, 611, 619, 641, 649, 658 and 666; and one or more of VL1, VL2, VL3 and VL4 comprises a CDR1 comprising an amino acid sequence having at least 80%, at least 85%, at least 90%, at least 91%, at least 92%, at least 93%, at least 94%, at least 95%, at least 96%, at least 97%, at least 98%, at least 99% or 100% identity to any one of SEQ ID NOs:39, 47, 55, 63, 71, 167, 175, 183, 260, 268, 276, 284, 517, 525, 533, 541, 549, 557, 565, 573, 581, 589, 597, 605, 613, 621, 643, 651, 660 and 668; a CDR2 comprising an amino acid sequence having at least 80%, at least 85%, at least 90%, at least 91%, at least 92%, at least 93%, at least 94%, at least 95%, at least 96%, at least 97%, at least 98%, at least 99% or 100% identity to any one of SEQ ID NOs:40, 48, 56, 64, 72, 168, 176, 184, 261, 269, 277 (having the sequence of LGS), 285, 518 (having the sequence of DAS), 526 (having the sequence of DVS), 534 (having the sequence of EDS), 542 (having the sequence of KDS), 550 (having the sequence of DAS), 558 (having the sequence of AAS), 566 (having the sequence of GAS), 574 (having the sequence of DDS), 582 (having the sequence of KDS), 590 (having the sequence of SAS), 598 (having the sequence of SAS), 606 (having the sequence of GAS), 614 (having the sequence of GAS), 622 (having the sequence of GAS), 644 (having the sequence of GAS), 652 (having the sequence of SAS), 661 (having the sequence of GAS) and 669 (having the sequence of DAS); and/or a CDR3 comprising an amino acid sequence having at least 80%, at least 85%, at least 90%, at least 91%, at least 92%, at least 93%, at least 94%, at least 95%, at least 96%, at least 97%, at least 98%, at least 99% or 100% identity to any one of SEQ ID NOs:41, 49, 57, 65, 73, 169, 177, 185, 262, 270, 278, 286, 591, 599, 607, 615, 623, 645, 653, 662 and 670, or any other CDR sequence within a larger VH, VL or full length polypeptide chain sequence disclosed herein. In some preferred aspects, CDR1, CDR2 and CDR3 of one or more of VH1, VH2, VH3, VH4, VL1, VL2, VL3 and VL4 have at least 90% identity with the corresponding amino acid sequences specified above. As used herein, “at least 90% identity” includes at least 91%, 92%, 93%, 94%, 95%, 96%, 97%, 98%, 99% and 100% identity to the recited reference sequence. In some particularly preferred aspects, CDR1, CDR2 and CDR3 of one or more of VH1, VH2, VH3, VH4, VL1, VL2, VL3 and VL4 comprise or consist of the corresponding amino acid sequences specified above. Any combination of VH1, VH2, VH3 and/or VH4 described above may be used in combination with any combination of VL1, VL2, VL3 and/or VL4 described above. In some preferred aspects, CDR1, CDR2 and CDR3 of VH1, VH2, VH3, VH4, VL1, VL2, VL3 and VL4 have at least 90% identity with the corresponding amino acid sequences specified above. As used herein, “at least 90% identity” includes at least 91%, 92%, 93%, 94%, 95%, 96%, 97%, 98%, 99% and 100% identity to the recited reference sequence. In some particularly preferred aspects, CDR1, CDR2 and CDR3 of VH1, VH2, VH3, VH4, VL1, VL2, VL3 and VL4 comprise or consist of the corresponding amino acid sequences specified above.

[0382] In some aspects, one or more of VH1, VH2, VH3 and VH4 comprises an amino acid sequence having at least 80%, at least 85%, at least 90%, at least 91%, at least 92%, at least 93%, at least 94%, at least 95%, at least 96%, at least 97%, at least 98%, at least 99% or 100% identity to any one of SEQ ID NOs:42, 50, 58, 66, 74, 170, 178, 186, 263, 271, 279, 287, 510, 512, 520, 528, 536, 544, 552, 560, 568, 576, 584, 592, 600, 608, 616, 624, 626, 628, 630, 632, 634, 636, 638, 646, 654, 663, 779, 781, 785 and 787, or any other VH sequence within a full length polypeptide chain sequence disclosed herein. In some aspects, the sequence has a mutation at N62, for example, N62Q or N62Q at, for example, SEQ ID NO:279. In some preferred aspects, one or more of VH1, VH2, VH3 and VH4 have at least 90% identity with the corresponding amino acid sequences specified above, optionally with a mutation at N62 as specified above. As used herein, “at least 90% identity” includes at least 91%, 92%, 93%, 94%, 95%, 96%, 97%, 98%, 99% and 100% identity to the recited reference sequence. In some particularly preferred aspects, one or more of VH1, VH2, VH3 and VH4 comprise or consist of the corresponding amino acid sequences specified above, optionally with a mutation at N62 as specified above. In some preferred aspects, VH1, VH2, VH3 and VH4 have at least 90% identity with the corresponding amino acid sequences specified above, optionally with a mutation at N62 as specified above. As used herein, “at least 90% identity” includes at least 91%, 92%, 93%, 94%, 95%, 96%, 97%, 98%, 99% and 100% identity to the recited reference sequence. In some particularly preferred aspects, VH1, VH2, VH3 and VH4 comprise or consist of the corresponding amino acid sequences specified above, optionally with a mutation at N62 as specified above.

[0383] In some aspects, one or more of VL1, VL2, VL3 and VL4 comprises an amino acid sequence having at least 80%, at least 85%, at least 90%, at least 91%, at least 92%, at least 93%, at least 94%, at least 95%, at least 96%, at least 97%, at least 98%, at least 99% or 100% identity to any one of SEQ ID NOs:38, 46, 54, 62, 70, 166, 174, 182, 259, 267, 275, 283, 508, 509, 511, 519, 527, 535, 543, 551, 559, 567, 575, 583, 588, 596, 604, 612, 620, 625, 627, 629, 631, 633, 635, 637, 642, 650, 659 and 667, or any other VL sequence within a full length polypeptide chain sequence disclosed herein. In some preferred aspects, one or more of VL1, VL2, VL3 and VL4 have at least 90% identity with the corresponding amino acid sequences specified above. As used herein, “at least 90% identity” includes at least 91%, 92%, 93%, 94%, 95%, 96%, 97%, 98%, 99% and 100% identity to the recited reference sequence. In some particularly preferred aspects, one or more of VL1, VL2, VL3 and VL4 comprise or consist of the corresponding amino acid sequences specified above. In some preferred aspects, VL1, VL2, VL3 and VL4 have at least 90% identity with the corresponding amino acid sequences specified above. As used herein, “at least 90% identity” includes at least 91%, 92%, 93%, 94%, 95%, 96%, 97%, 98%, 99% and 100% identity to the recited reference sequence. In some particularly preferred aspects, VL1, VL2, VL3 and VL4 comprise or consist of the corresponding amino acid sequences specified above.

[0384] In some aspects, one or more of VH1, VH2, VH3 and VH4 comprises an amino acid sequence having at least 80%, at least 85%, at least 90%, at least 91%, at least 92%, at least 93%, at least 94%, at least 95%, at least 96%, at least 97%, at least 98%, at least 99% or 100% identity to any one of SEQ ID NOs:42, 50, 58, 66, 74, 170, 178, 186, 263, 271, 279, 287, 510, 512, 520, 528, 536, 544, 552, 560, 568, 576, 584, 592, 600, 608, 616, 624, 626, 628, 630, 632, 634, 636, 638, 646, 654, 663, 779, 781, 785 and 787; and one or more of VL1, VL2, VL3 and VL4 comprises an amino acid sequence having at least 80%, at least 85%, at least 90%, at least 91%, at least 92%, at least 93%, at least 94%, at least 95%, at least 96%, at least 97%, at least 98%, at least 99% or 100% identity to any one of SEQ ID NOs:38, 46, 54, 62, 70, 166, 174, 182, 259, 267, 275, 283, 508, 509, 511, 516, 524, 532, 540, 548, 556, 564, 572, 580, 588, 596, 604, 612, 620, 625, 627, 629, 631, 633, 635, 637, 642, 650, 659 and 667, or any other VH or VL sequence within a full length polypeptide chain sequence disclosed herein. In some aspects, the sequence has a mutation at N62, for example, N62Q or N62Q at, for example, SEQ ID NO:279. In some preferred aspects, one or more of VH1, VH2, VH3, VH4, VL1, VL2, VL3 and VL4 have at least 90% identity with the corresponding amino acid sequences specified above. As used herein, “at least 90% identity” includes at least 91%, 92%, 93%, 94%, 95%, 96%, 97%, 98%, 99% and 100% identity to the recited reference sequence. In some particularly preferred aspects, one or more of VH1, VH2, VH3, VH4, VL1, VL2, VL3 and VL4 comprise or consist of the corresponding amino acid sequences specified above. In some preferred aspects, VH1, VH2, VH3, VH4, VL1, VL2, VL3 and VL4 have at least 90% identity with the corresponding amino acid sequences specified above. As used herein, “at least 90% identity” includes at least 91%, 92%, 93%, 94%, 95%, 96%, 97%, 98%, 99% and 100% identity to the recited reference sequence. In some particularly preferred aspects, VH1, VH2, VH3, VH4, VL1, VL2, VL3 and VL4 comprise or consist of the corresponding amino acid sequences specified above.

[0385] In some aspects, one or more of VH1, VH2, VH3 and VH4 comprises a CDR1 comprising an amino acid sequence having at least 80%, at least 85%, at least 90%, at least 91%, at least 92%, at least 93%, at least 94%, at least 95%, at least 96%, at least 97%, at least 98%, at least 99% or 100% identity to SEQ ID NO:513; a CDR2 comprising an amino acid sequence having at least 80%, at least 85%, at least 90%, at least 91%, at least 92%, at least 93%, at least 94%, at least 95%, at least 96%, at least 97%, at least 98%, at least 99% or 100% identity to SEQ ID NO:514; and/or a CDR3 comprising an amino acid sequence having at least 80%, at least 85%, at least 90%, at least 91%, at least 92%, at least 93%, at least 94%, at least 95%, at least 96%, at least 97%, at least 98%, at least 99% or 100% identity to SEQ ID NO:515; and one or more of VL1, VL2, VL3 and VL4 comprises a CDR1 comprising an amino acid sequence having at least 80%, at least 85%, at least 90%, at least 91%, at least 92%, at least 93%, at least 94%, at least 95%, at least 96%, at least 97%, at least 98%, at least 99% or 100% identity to SEQ ID NO:517; a CDR2 comprising an amino acid sequence having at least 80%, at least 85%, at least 90%, at least 91%, at least 92%, at least 93%, at least 94%, at least 95%, at least 96%, at least 97%, at least 98%, at least 99% or 100% identity to SEQ ID NO:518 (having the sequence of DAS); and/or a CDR3 comprising an amino acid sequence having at least 80%, at least 85%, at least 90%, at least 91%, at least 92%, at least 93%, at least 94%, at least 95%, at least 96%, at least 97%, at least 98%, at least 99% or 100% identity to SEQ ID NO:519. In some aspects, CDR1, CDR2 and CDR3 of one or more of VH1, VH2, VH3, VH4, VL1, VL2, VL3 and VL4 have at least 90% identity with the corresponding amino acid sequences specified above. As used herein, “at least 90% identity” includes at least 91%, 92%, 93%, 94%, 95%, 96%, 97%, 98%, 99% and 100% identity to the recited reference sequence. In some aspects, CDR1, CDR2 and CDR3 of one or more of VH1, VH2, VH3, VH4, VL1, VL2, VL3 and VL4 comprise or consist of the corresponding amino acid sequences specified above. In some preferred aspects, CDR1, CDR2 and CDR3 of VH1, VH2, VH3, VH4, VL1, VL2, VL3 and VL4 have at least 90% identity with the corresponding amino acid sequences specified above. As used herein, “at least 90% identity” includes at least 91%, 92%, 93%, 94%, 95%, 96%, 97%, 98%, 99% and 100% identity to the recited reference sequence. In some particularly preferred aspects, CDR1, CDR2 and CDR3 of VH1, VH2, VH3, VH4, VL1, VL2, VL3 and VL4 comprise or consist of the corresponding amino acid sequences specified above.

[0386] In some aspects, one or more of VH1, VH2, VH3 and VH4 comprises an amino acid sequence having at least 80%, at least 85%, at least 90%, at least 91%, at least 92%, at least 93%, at least 94%, at least 95%, at least 96%, at least 97%, at least 98%, at least 99% or 100% identity to SEQ ID NO:512; and one or more of VL1, VL2, VL3 and VL4 comprises an amino acid sequence having at least 80%, at least 85%, at least 90%, at least 91%, at least 92%, at least 93%, at least 94%, at least 95%, at least 96%, at least 97%, at least 98%, at least 99% or 100% identity to SEQ ID NO:516. In some aspects, one or more of VH1, VH2, VH3, VH4, VL1, VL2, VL3 and VL4 have at least 90% identity with the corresponding amino acid sequences specified above. As used herein, “at least 90% identity” includes at least 91%, 92%, 93%, 94%, 95%, 96%, 97%, 98%, 99% and 100% identity to the recited reference sequence. In some aspects, one or more of VH1, VH2, VH3, VH4, VL1, VL2, VL3 and VL4 comprise or consist of the corresponding amino acid sequences specified above. In some preferred aspects, VH1, VH2, VH3, VH4, VL1, VL2, VL3 and VL4 have at least 90% identity with the corresponding amino acid sequences specified above. As used herein, “at least 90% identity” includes at least 91%, 92%, 93%, 94%, 95%, 96%, 97%, 98%, 99% and 100% identity to the recited reference sequence. In some preferred aspects, VH1, VH2, VH3, VH4, VL1, VL2, VL3 and VL4 comprise or consist of the corresponding amino acid sequences specified above.

[0387] In some aspects, one or more of VH1, VH2, VH3 and VH4 comprises a CDR1 comprising an amino acid sequence having at least 80%, at least 85%, at least 90%, at least 91%, at least 92%, at least 93%, at least 94%, at least 95%, at least 96%, at least 97%, at least 98%, at least 99% or 100% identity to SEQ ID NO:521; a CDR2 comprising an amino acid sequence having at least 80%, at least 85%, at least 90%, at least 91%, at least 92%, at least 93%, at least 94%, at least 95%, at least 96%, at least 97%, at least 98%, at least 99% or 100% identity to SEQ ID NO:522; and/or a CDR3 comprising an amino acid sequence having at least 80%, at least 85%, at least 90%, at least 91%, at least 92%, at least 93%, at least 94%, at least 95%, at least 96%, at least 97%, at least 98%, at least 99% or 100% identity to SEQ ID NO:523; and one or more of VL1, VL2, VL3 and VL4 comprises a CDR1 comprising an amino acid sequence having at least 80%, at least 85%, at least 90%, at least 91%, at least 92%, at least 93%, at least 94%, at least 95%, at least 96%, at least 97%, at least 98%, at least 99% or 100% identity to SEQ ID NO:525; a CDR2 comprising an amino acid sequence having at least 80%, at least 85%, at least 90%, at least 91%, at least 92%, at least 93%, at least 94%, at least 95%, at least 96%, at least 97%, at least 98%, at least 99% or 100% identity to SEQ ID NO:526 (having the sequence of DVS); and/or a CDR3 comprising an amino acid sequence having at least 80%, at least 85%, at least 90%, at least 91%, at least 92%, at least 93%, at least 94%, at least 95%, at least 96%, at least 97%, at least 98%, at least 99% or 100% identity to SEQ ID NO:527. In some aspects, CDR1, CDR2 and CDR3 of one or more of VH1, VH2, VH3, VH4, VL1, VL2, VL3 and VL4 have at least 90% identity with the corresponding amino acid sequences specified above. As used herein, “at least 90% identity” includes at least 91%, 92%, 93%, 94%, 95%, 96%, 97%, 98%, 99% and 100% identity to the recited reference sequence. In some aspects, CDR1, CDR2 and CDR3 of one or more of VH1, VH2, VH3, VH4, VL1, VL2, VL3 and VL4 comprise or consist of the corresponding amino acid sequences specified above. In some preferred aspects, CDR1, CDR2 and CDR3 of VH1, VH2, VH3, VH4, VL1, VL2, VL3 and VL4 have at least 90% identity with the corresponding amino acid sequences specified above. As used herein, “at least 90% identity” includes at least 91%, 92%, 93%, 94%, 95%, 96%, 97%, 98%, 99% and 100% identity to the recited reference sequence. In some particularly preferred aspects, CDR1, CDR2 and CDR3 of VH1, VH2, VH3, VH4, VL1, VL2, VL3 and VL4 comprise or consist of the corresponding amino acid sequences specified above.

[0388] In some aspects, one or more of VH1, VH2, VH3 and VH4 comprises an amino acid sequence having at least 80%, at least 85%, at least 90%, at least 91%, at least 92%, at least 93%, at least 94%, at least 95%, at least 96%, at least 97%, at least 98%, at least 99% or 100% identity to SEQ ID NO:520; and one or more of VL1, VL2, VL3 and VL4 comprises an amino acid sequence having at least 80%, at least 85%, at least 90%, at least 91%, at least 92%, at least 93%, at least 94%, at least 95%, at least 96%, at least 97%, at least 98%, at least 99% or 100% identity to SEQ ID NO:524. In some aspects, one or more of VH1, VH2, VH3, VH4, VL1, VL2, VL3 and VL4 have at least 90% identity with the corresponding amino acid sequences specified above. As used herein, “at least 90% identity” includes at least 91%, 92%, 93%, 94%, 95%, 96%, 97%, 98%, 99% and 100% identity to the recited reference sequence. In some aspects, one or more of VH1, VH2, VH3, VH4, VL1, VL2, VL3 and VL4 comprise or consist of the corresponding amino acid sequences specified above. In some preferred aspects, VH1, VH2, VH3, VH4, VL1, VL2, VL3 and VL4 have at least 90% identity with the corresponding amino acid sequences specified above. As used herein, “at least 90% identity” includes at least 91%, 92%, 93%, 94%, 95%, 96%, 97%, 98%, 99% and 100% identity to the recited reference sequence. In some preferred aspects, VH1, VH2, VH3, VH4, VL1, VL2, VL3 and VL4 comprise or consist of the corresponding amino acid sequences specified above.

[0389] In some aspects, one or more of VH1, VH2, VH3 and VH4 comprises a CDR1 comprising an amino acid sequence having at least 80%, at least 85%, at least 90%, at least 91%, at least 92%, at least 93%, at least 94%, at least 95%, at least 96%, at least 97%, at least 98%, at least 99% or 100% identity to SEQ ID NO:529; a CDR2 comprising an amino acid sequence having at least 80%, at least 85%, at least 90%, at least 91%, at least 92%, at least 93%, at least 94%, at least 95%, at least 96%, at least 97%, at least 98%, at least 99% or 100% identity to SEQ ID NO:530; and/or a CDR3 comprising an amino acid sequence having at least 80%, at least 85%, at least 90%, at least 91%, at least 92%, at least 93%, at least 94%, at least 95%, at least 96%, at least 97%, at least 98%, at least 99% or 100% identity to SEQ ID NO:531; and one or more of VL1, VL2, VL3 and VL4 comprises a CDR1 comprising an amino acid sequence having at least 80%, at least 85%, at least 90%, at least 91%, at least 92%, at least 93%, at least 94%, at least 95%, at least 96%, at least 97%, at least 98%, at least 99% or 100% identity to SEQ ID NO:533; a CDR2 comprising an amino acid sequence having at least 80%, at least 85%, at least 90%, at least 91%, at least 92%, at least 93%, at least 94%, at least 95%, at least 96%, at least 97%, at least 98%, at least 99% or 100% identity to SEQ ID NO:534 (having the sequence of EDS); and/or a CDR3 comprising an amino acid sequence having at least 80%, at least 85%, at least 90%, at least 91%, at least 92%, at least 93%, at least 94%, at least 95%, at least 96%, at least 97%, at least 98%, at least 99% or 100% identity to SEQ ID NO:535. In some aspects, CDR1, CDR2 and CDR3 of one or more of VH1, VH2, VH3, VH4, VL1, VL2, VL3 and VL4 have at least 90% identity with the corresponding amino acid sequences specified above. As used herein, “at least 90% identity” includes at least 91%, 92%, 93%, 94%, 95%, 96%, 97%, 98%, 99% and 100% identity to the recited reference sequence. In some aspects, CDR1, CDR2 and CDR3 of one or more of VH1, VH2, VH3, VH4, VL1, VL2, VL3 and VL4 comprise or consist of the corresponding amino acid sequences specified above. In some preferred aspects, CDR1, CDR2 and CDR3 of VH1, VH2, VH3, VH4, VL1, VL2, VL3 and VL4 have at least 90% identity with the corresponding amino acid sequences specified above. As used herein, “at least 90% identity” includes at least 91%, 92%, 93%, 94%, 95%, 96%, 97%, 98%, 99% and 100% identity to the recited reference sequence. In some particularly preferred aspects, CDR1, CDR2 and CDR3 of VH1, VH2, VH3, VH4, VL1, VL2, VL3 and VL4 comprise or consist of the corresponding amino acid sequences specified above.

[0390] In some aspects, one or more of VH1, VH2, VH3 and VH4 comprises an amino acid sequence having at least 80%, at least 85%, at least 90%, at least 91%, at least 92%, at least 93%, at least 94%, at least 95%, at least 96%, at least 97%, at least 98%, at least 99% or 100% identity to SEQ ID NO:528; and one or more of VL1, VL2, VL3 and VL4 comprises an amino acid sequence having at least 80%, at least 85%, at least 90%, at least 91%, at least 92%, at least 93%, at least 94%, at least 95%, at least 96%, at least 97%, at least 98%, at least 99% or 100% identity to SEQ ID NO:532. In some aspects, one or more of VH1, VH2, VH3, VH4, VL1, VL2, VL3 and VL4 have at least 90% identity with the corresponding amino acid sequences specified above. As used herein, “at least 90% identity” includes at least 91%, 92%, 93%, 94%, 95%, 96%, 97%, 98%, 99% and 100% identity to the recited reference sequence. In some aspects, one or more of VH1, VH2, VH3, VH4, VL1, VL2, VL3 and VL4 comprise or consist of the corresponding amino acid sequences specified above. In some preferred aspects, VH1, VH2, VH3, VH4, VL1, VL2, VL3 and VL4 have at least 90% identity with the corresponding amino acid sequences specified above. As used herein, “at least 90% identity” includes at least 91%, 92%, 93%, 94%, 95%, 96%, 97%, 98%, 99% and 100% identity to the recited reference sequence. In some preferred aspects, VH1, VH2, VH3, VH4, VL1, VL2, VL3 and VL4 comprise or consist of the corresponding amino acid sequences specified above.

[0391] In some aspects, one or more of VH1, VH2, VH3 and VH4 comprises a CDR1 comprising an amino acid sequence having at least 80%, at least 85%, at least 90%, at least 91%, at least 92%, at least 93%, at least 94%, at least 95%, at least 96%, at least 97%, at least 98%, at least 99% or 100% identity to SEQ ID NO:537; a CDR2 comprising an amino acid sequence having at least 80%, at least 85%, at least 90%, at least 91%, at least 92%, at least 93%, at least 94%, at least 95%, at least 96%, at least 97%, at least 98%, at least 99% or 100% identity to SEQ ID NO:538; and/or a CDR3 comprising an amino acid sequence having at least 80%, at least 85%, at least 90%, at least 91%, at least 92%, at least 93%, at least 94%, at least 95%, at least 96%, at least 97%, at least 98%, at least 99% or 100% identity to SEQ ID NO:539; and one or more of VL1, VL2, VL3 and VL4 comprises a CDR1 comprising an amino acid sequence having at least 80%, at least 85%, at least 90%, at least 91%, at least 92%, at least 93%, at least 94%, at least 95%, at least 96%, at least 97%, at least 98%, at least 99% or 100% identity to SEQ ID NO:541; a CDR2 comprising an amino acid sequence having at least 80%, at least 85%, at least 90%, at least 91%, at least 92%, at least 93%, at least 94%, at least 95%, at least 96%, at least 97%, at least 98%, at least 99% or 100% identity to SEQ ID NO:542 (having the sequence of KDS); and/or a CDR3 comprising an amino acid sequence having at least 80%, at least 85%, at least 90%, at least 91%, at least 92%, at least 93%, at least 94%, at least 95%, at least 96%, at least 97%, at least 98%, at least 99% or 100% identity to SEQ ID NO:543. In some aspects, CDR1, CDR2 and CDR3 of one or more of VH1, VH2, VH3, VH4, VL1, VL2, VL3 and VL4 have at least 90% identity with the corresponding amino acid sequences specified above. As used herein, “at least 90% identity” includes at least 91%, 92%, 93%, 94%, 95%, 96%, 97%, 98%, 99% and 100% identity to the recited reference sequence. In some aspects, CDR1, CDR2 and CDR3 of one or more of VH1, VH2, VH3, VH4, VL1, VL2, VL3 and VL4 comprise or consist of the corresponding amino acid sequences specified above. In some preferred aspects, CDR1, CDR2 and CDR3 of VH1, VH2, VH3, VH4, VL1, VL2, VL3 and VL4 have at least 90% identity with the corresponding amino acid sequences specified above. As used herein, “at least 90% identity” includes at least 91%, 92%, 93%, 94%, 95%, 96%, 97%, 98%, 99% and 100% identity to the recited reference sequence. In some particularly preferred aspects, CDR1, CDR2 and CDR3 of VH1, VH2, VH3, VH4, VL1, VL2, VL3 and VL4 comprise or consist of the corresponding amino acid sequences specified above.

[0392] In some aspects, one or more of VH1, VH2, VH3 and VH4 comprises an amino acid sequence having at least 80%, at least 85%, at least 90%, at least 91%, at least 92%, at least 93%, at least 94%, at least 95%, at least 96%, at least 97%, at least 98%, at least 99% or 100% identity to SEQ ID NO:536; and one or more of VL1, VL2, VL3 and VL4 comprises an amino acid sequence having at least 80%, at least 85%, at least 90%, at least 91%, at least 92%, at least 93%, at least 94%, at least 95%, at least 96%, at least 97%, at least 98%, at least 99% or 100% identity to SEQ ID NO:540. In some aspects, one or more of VH1, VH2, VH3, VH4, VL1, VL2, VL3 and VL4 have at least 90% identity with the corresponding amino acid sequences specified above. As used herein, “at least 90% identity” includes at least 91%, 92%, 93%, 94%, 95%, 96%, 97%, 98%, 99% and 100% identity to the recited reference sequence. In some aspects, one or more of VH1, VH2, VH3, VH4, VL1, VL2, VL3 and VL4 comprise or consist of the corresponding amino acid sequences specified above. In some preferred aspects, VH1, VH2, VH3, VH4, VL1, VL2, VL3 and VL4 have at least 90% identity with the corresponding amino acid sequences specified above. As used herein, “at least 90% identity” includes at least 91%, 92%, 93%, 94%, 95%, 96%, 97%, 98%, 99% and 100% identity to the recited reference sequence. In some particularly preferred aspects, VH1, VH2, VH3, VH4, VL1, VL2, VL3 and VL4 comprise or consist of the corresponding amino acid sequences specified above.

[0393] In some aspects, one or more of VH1, VH2, VH3 and VH4 comprises a CDR1 comprising an amino acid sequence having at least 80%, at least 85%, at least 90%, at least 91%, at least 92%, at least 93%, at least 94%, at least 95%, at least 96%, at least 97%, at least 98%, at least 99% or 100% identity to SEQ ID NO:545; a CDR2 comprising an amino acid sequence having at least 80%, at least 85%, at least 90%, at least 91%, at least 92%, at least 93%, at least 94%, at least 95%, at least 96%, at least 97%, at least 98%, at least 99% or 100% identity to SEQ ID NO:546; and/or a CDR3 comprising an amino acid sequence having at least 80%, at least 85%, at least 90%, at least 91%, at least 92%, at least 93%, at least 94%, at least 95%, at least 96%, at least 97%, at least 98%, at least 99% or 100% identity to SEQ ID NO:547; and one or more of VL1, VL2, VL3 and VL4 comprises a CDR1 comprising an amino acid sequence having at least 80%, at least 85%, at least 90%, at least 91%, at least 92%, at least 93%, at least 94%, at least 95%, at least 96%, at least 97%, at least 98%, at least 99% or 100% identity to SEQ ID NO:549; a CDR2 comprising an amino acid sequence having at least 80%, at least 85%, at least 90%, at least 91%, at least 92%, at least 93%, at least 94%, at least 95%, at least 96%, at least 97%, at least 98%, at least 99% or 100% identity to SEQ ID NO:550 (having the sequence of DAS); and/or a CDR3 comprising an amino acid sequence having at least 80%, at least 85%, at least 90%, at least 91%, at least 92%, at least 93%, at least 94%, at least 95%, at least 96%, at least 97%, at least 98%, at least 99% or 100% identity to SEQ ID NO:551. In some aspects, CDR1, CDR2 and CDR3 of one or more of VH1, VH2, VH3, VH4, VL1, VL2, VL3 and VL4 have at least 90% identity with the corresponding amino acid sequences specified above. As used herein, “at least 90% identity” includes at least 91%, 92%, 93%, 94%, 95%, 96%, 97%, 98%, 99% and 100% identity to the recited reference sequence. In some aspects, CDR1, CDR2 and CDR3 of one or more of VH1, VH2, VH3, VH4, VL1, VL2, VL3 and VL4 comprise or consist of the corresponding amino acid sequences specified above. In some preferred aspects, CDR1, CDR2 and CDR3 of VH1, VH2, VH3, VH4, VL1, VL2, VL3 and VL4 have at least 90% identity with the corresponding amino acid sequences specified above. As used herein, “at least 90% identity” includes at least 91%, 92%, 93%, 94%, 95%, 96%, 97%, 98%, 99% and 100% identity to the recited reference sequence. In some particularly preferred aspects, CDR1, CDR2 and CDR3 of VH1, VH2, VH3, VH4, VL1, VL2, VL3 and VL4 comprise or consist of the corresponding amino acid sequences specified above.

[0394] In some aspects, one or more of VH1, VH2, VH3 and VH4 comprises an amino acid sequence having at least 80%, at least 85%, at least 90%, at least 91%, at least 92%, at least 93%, at least 94%, at least 95%, at least 96%, at least 97%, at least 98%, at least 99% or 100% identity to SEQ ID NO:544; and one or more of VL1, VL2, VL3 and VL4 comprises an amino acid sequence having at least 80%, at least 85%, at least 90%, at least 91%, at least 92%, at least 93%, at least 94%, at least 95%, at least 96%, at least 97%, at least 98%, at least 99% or 100% identity to SEQ ID NO:548. In some aspects, one or more of VH1, VH2, VH3, VH4, VL1, VL2, VL3 and VL4 have at least 90% identity with the corresponding amino acid sequences specified above. As used herein, “at least 90% identity” includes at least 91%, 92%, 93%, 94%, 95%, 96%, 97%, 98%, 99% and 100% identity to the recited reference sequence. In some aspects, one or more of VH1, VH2, VH3, VH4, VL1, VL2, VL3 and VL4 comprise or consist of the corresponding amino acid sequences specified above. In some preferred aspects, VH1, VH2, VH3, VH4, VL1, VL2, VL3 and VL4 have at least 90% identity with the corresponding amino acid sequences specified above. As used herein, “at least 90% identity” includes at least 91%, 92%, 93%, 94%, 95%, 96%, 97%, 98%, 99% and 100% identity to the recited reference sequence. In some preferred aspects, VH1, VH2, VH3, VH4, VL1, VL2, VL3 and VL4 comprise or consist of the corresponding amino acid sequences specified above.

[0395] In some aspects, one or more of VH1, VH2, VH3 and VH4 comprises an amino acid sequence having at least 80%, at least 85%, at least 90%, at least 91%, at least 92%, at least 93%, at least 94%, at least 95%, at least 96%, at least 97%, at least 98%, at least 99% or 100% identity to SEQ ID NO:624; and one or more of VL1, VL2, VL3 and VL4 comprises an amino acid sequence having at least 80%, at least 85%, at least 90%, at least 91%, at least 92%, at least 93%, at least 94%, at least 95%, at least 96%, at least 97%, at least 98%, at least 99% or 100% identity to SEQ ID NO:625. In some aspects, one or more of VH1, VH2, VH3, VH4, VL1, VL2, VL3 and VL4 have at least 90% identity with the corresponding amino acid sequences specified above. As used herein, “at least 90% identity” includes at least 91%, 92%, 93%, 94%, 95%, 96%, 97%, 98%, 99% and 100% identity to the recited reference sequence. In some aspects, one or more of VH1, VH2, VH3, VH4, VL1, VL2, VL3 and VL4 comprise or consist of the corresponding amino acid sequences specified above. In some preferred aspects, VH1, VH2, VH3, VH4, VL1, VL2, VL3 and VL4 have at least 90% identity with the corresponding amino acid sequences specified above. As used herein, “at least 90% identity” includes at least 91%, 92%, 93%, 94%, 95%, 96%, 97%, 98%, 99% and 100% identity to the recited reference sequence. In some preferred aspects, VH1, VH2, VH3, VH4, VL1, VL2, VL3 and VL4 comprise or consist of the corresponding amino acid sequences specified above.

[0396] In some aspects, one or more of VH1, VH2, VH3 and VH4 comprises an amino acid sequence having at least 80%, at least 85%, at least 90%, at least 91%, at least 92%, at least 93%, at least 94%, at least 95%, at least 96%, at least 97%, at least 98%, at least 99% or 100% identity to SEQ ID NO:626; and one or more of VL1, VL2, VL3 and VL4 comprises an amino acid sequence having at least 80%, at least 85%, at least 90%, at least 91%, at least 92%, at least 93%, at least 94%, at least 95%, at least 96%, at least 97%, at least 98%, at least 99% or 100% identity to SEQ ID NO:627. In some aspects, one or more of VH1, VH2, VH3, VH4, VL1, VL2, VL3 and VL4 have at least 90% identity with the corresponding amino acid sequences specified above. As used herein, “at least 90% identity” includes at least 91%, 92%, 93%, 94%, 95%, 96%, 97%, 98%, 99% and 100% identity to the recited reference sequence. In some aspects, one or more of VH1, VH2, VH3, VH4, VL1, VL2, VL3 and VL4 comprise or consist of the corresponding amino acid sequences specified above. In some preferred aspects, VH1, VH2, VH3, VH4, VL1, VL2, VL3 and VL4 have at least 90% identity with the corresponding amino acid sequences specified above. As used herein, “at least 90% identity” includes at least 91%, 92%, 93%, 94%, 95%, 96%, 97%, 98%, 99% and 100% identity to the recited reference sequence. In some particularly preferred aspects, VH1, VH2, VH3, VH4, VL1, VL2, VL3 and VL4 comprise or consist of the corresponding amino acid sequences specified above.

[0397] In some aspects, one or more of VH1, VH2, VH3 and VH4 comprises an amino acid sequence having at least 80%, at least 85%, at least 90%, at least 91%, at least 92%, at least 93%, at least 94%, at least 95%, at least 96%, at least 97%, at least 98%, at least 99% or 100% identity to SEQ ID NO:628; and one or more of VL1, VL2, VL3 and VL4 comprises an amino acid sequence having at least 80%, at least 85%, at least 90%, at least 91%, at least 92%, at least 93%, at least 94%, at least 95%, at least 96%, at least 97%, at least 98%, at least 99% or 100% identity to SEQ ID NO:629. In some aspects, one or more of VH1, VH2, VH3, VH4, VL1, VL2, VL3 and VL4 have at least 90% identity with the corresponding amino acid sequences specified above. As used herein, “at least 90% identity” includes at least 91%, 92%, 93%, 94%, 95%, 96%, 97%, 98%, 99% and 100% identity to the recited reference sequence. In some aspects, one or more of VH1, VH2, VH3, VH4, VL1, VL2, VL3 and VL4 comprise or consist of the corresponding amino acid sequences specified above. In some preferred aspects, VH1, VH2, VH3, VH4, VL1, VL2, VL3 and VL4 have at least 90% identity with the corresponding amino acid sequences specified above. As used herein, “at least 90% identity” includes at least 91%, 92%, 93%, 94%, 95%, 96%, 97%, 98%, 99% and 100% identity to the recited reference sequence. In some particularly preferred aspects, VH1, VH2, VH3, VH4, VL1, VL2, VL3 and VL4 comprise or consist of the corresponding amino acid sequences specified above.

[0398] In some aspects, one or more of VH1, VH2, VH3 and VH4 comprises an amino acid sequence having at least 80%, at least 85%, at least 90%, at least 91%, at least 92%, at least 93%, at least 94%, at least 95%, at least 96%, at least 97%, at least 98%, at least 99% or 100% identity to SEQ ID NO:630; and one or more of VL1, VL2, VL3 and VL4 comprises an amino acid sequence having at least 80%, at least 85%, at least 90%, at least 91%, at least 92%, at least 93%, at least 94%, at least 95%, at least 96%, at least 97%, at least 98%, at least 99% or 100% identity to SEQ ID NO:631. In some aspects, one or more of VH1, VH2, VH3, VH4, VL1, VL2, VL3 and VL4 have at least 90% identity with the corresponding amino acid sequences specified above. As used herein, “at least 90% identity” includes at least 91%, 92%, 93%, 94%, 95%, 96%, 97%, 98%, 99% and 100% identity to the recited reference sequence. In some aspects, one or more of VH1, VH2, VH3, VH4, VL1, VL2, VL3 and VL4 comprise or consist of the corresponding amino acid sequences specified above. In some preferred aspects, VH1, VH2, VH3, VH4, VL1, VL2, VL3 and VL4 have at least 90% identity with the corresponding amino acid sequences specified above. As used herein, “at least 90% identity” includes at least 91%, 92%, 93%, 94%, 95%, 96%, 97%, 98%, 99% and 100% identity to the recited reference sequence. In some particularly preferred aspects, VH1, VH2, VH3, VH4, VL1, VL2, VL3 and VL4 comprise or consist of the corresponding amino acid sequences specified above.

[0399] In some aspects, one or more of VH1, VH2, VH3 and VH4 comprises an amino acid sequence having at least 80%, at least 85%, at least 90%, at least 91%, at least 92%, at least 93%, at least 94%, at least 95%, at least 96%, at least 97%, at least 98%, at least 99% or 100% identity to SEQ ID NO:632; and one or more of VL1, VL2, VL3 and VL4 comprises an amino acid sequence having at least 80%, at least 85%, at least 90%, at least 91%, at least 92%, at least 93%, at least 94%, at least 95%, at least 96%, at least 97%, at least 98%, at least 99% or 100% identity to SEQ ID NO:633. In some aspects, one or more of VH1, VH2, VH3, VH4, VL1, VL2, VL3 and VL4 have at least 90% identity with the corresponding amino acid sequences specified above. As used herein, “at least 90% identity” includes at least 91%, 92%, 93%, 94%, 95%, 96%, 97%, 98%, 99% and 100% identity to the recited reference sequence. In some aspects, one or more of VH1, VH2, VH3, VH4, VL1, VL2, VL3 and VL4 comprise or consist of the corresponding amino acid sequences specified above. In some preferred aspects, VH1, VH2, VH3, VH4, VL1, VL2, VL3 and VL4 have at least 90% identity with the corresponding amino acid sequences specified above. As used herein, “at least 90% identity” includes at least 91%, 92%, 93%, 94%, 95%, 96%, 97%, 98%, 99% and 100% identity to the recited reference sequence. In some particularly preferred aspects, VH1, VH2, VH3, VH4, VL1, VL2, VL3 and VL4 comprise or consist of the corresponding amino acid sequences specified above.

[0400] In some aspects, one or more of VH1, VH2, VH3 and VH4 comprises an amino acid sequence having at least 80%, at least 85%, at least 90%, at least 91%, at least 92%, at least 93%, at least 94%, at least 95%, at least 96%, at least 97%, at least 98%, at least 99% or 100% identity to SEQ ID NO:634; and one or more of VL1, VL2, VL3 and VL4 comprises an amino acid sequence having at least 80%, at least 85%, at least 90%, at least 91%, at least 92%, at least 93%, at least 94%, at least 95%, at least 96%, at least 97%, at least 98%, at least 99% or 100% identity to SEQ ID NO:635. In some aspects, one or more of VH1, VH2, VH3, VH4, VL1, VL2, VL3 and VL4 have at least 90% identity with the corresponding amino acid sequences specified above. As used herein, “at least 90% identity” includes at least 91%, 92%, 93%, 94%, 95%, 96%, 97%, 98%, 99% and 100% identity to the recited reference sequence. In some aspects, one or more of VH1, VH2, VH3, VH4, VL1, VL2, VL3 and VL4 comprise or consist of the corresponding amino acid sequences specified above. In some preferred aspects, VH1, VH2, VH3, VH4, VL1, VL2, VL3 and VL4 have at least 90% identity with the corresponding amino acid sequences specified above. As used herein, “at least 90% identity” includes at least 91%, 92%, 93%, 94%, 95%, 96%, 97%, 98%, 99% and 100% identity to the recited reference sequence. In some particularly preferred aspects, VH1, VH2, VH3, VH4, VL1, VL2, VL3 and VL4 comprise or consist of the corresponding amino acid sequences specified above.

[0401] In some aspects, one or more of VH1, VH2, VH3 and VH4 comprises an amino acid sequence having at least 80%, at least 85%, at least 90%, at least 91%, at least 92%, at least 93%, at least 94%, at least 95%, at least 96%, at least 97%, at least 98%, at least 99% or 100% identity to SEQ ID NO:636; and one or more of VL1, VL2, VL3 and VL4 comprises an amino acid sequence having at least 80%, at least 85%, at least 90%, at least 91%, at least 92%, at least 93%, at least 94%, at least 95%, at least 96%, at least 97%, at least 98%, at least 99% or 100% identity to SEQ ID NO:637. In some aspects, one or more of VH1, VH2, VH3, VH4, VL1, VL2, VL3 and VL4 have at least 90% identity with the corresponding amino acid sequences specified above. As used herein, “at least 90% identity” includes at least 91%, 92%, 93%, 94%, 95%, 96%, 97%, 98%, 99% and 100% identity to the recited reference sequence. In some aspects, one or more of VH1, VH2, VH3, VH4, VL1, VL2, VL3 and VL4 comprise or consist of the corresponding amino acid sequences specified above. In some preferred aspects, VH1, VH2, VH3, VH4, VL1, VL2, VL3 and VL4 have at least 90% identity with the corresponding amino acid sequences specified above. As used herein, “at least 90% identity” includes at least 91%, 92%, 93%, 94%, 95%, 96%, 97%, 98%, 99% and 100% identity to the recited reference sequence. In some preferred aspects, VH1, VH2, VH3, VH4, VL1, VL2, VL3 and VL4 comprise or consist of the corresponding amino acid sequences specified above.

[0402] In some aspects, one or more of VH1, VH2, VH3 and VH4 comprises an amino acid sequence having at least 80%, at least 85%, at least 90%, at least 91%, at least 92%, at least 93%, at least 94%, at least 95%, at least 96%, at least 97%, at least 98%, at least 99% or 100% identity to SEQ ID NO:638; and one or more of VL1, VL2, VL3 and VL4 comprises an amino acid sequence having at least 80%, at least 85%, at least 90%, at least 91%, at least 92%, at least 93%, at least 94%, at least 95%, at least 96%, at least 97%, at least 98%, at least 99% or 100% identity to SEQ ID NO:642. In some aspects, one or more of VH1, VH2, VH3, VH4, VL1, VL2, VL3 and VL4 have at least 90% identity with the corresponding amino acid sequences specified above. As used herein, “at least 90% identity” includes at least 91%, 92%, 93%, 94%, 95%, 96%, 97%, 98%, 99% and 100% identity to the recited reference sequence. In some aspects, one or more of VH1, VH2, VH3, VH4, VL1, VL2, VL3 and VL4 comprise or consist of the corresponding amino acid sequences specified above. In some preferred aspects, VH1, VH2, VH3, VH4, VL1, VL2, VL3 and VL4 have at least 90% identity with the corresponding amino acid sequences specified above. As used herein, “at least 90% identity” includes at least 91%, 92%, 93%, 94%, 95%, 96%, 97%, 98%, 99% and 100% identity to the recited reference sequence. In some particularly preferred aspects, VH1, VH2, VH3, VH4, VL1, VL2, VL3 and VL4 comprise or consist of the corresponding amino acid sequences specified above.

[0403] In some aspects, one or more of VH1, VH2, VH3 and VH4 comprises an amino acid sequence having at least 80%, at least 85%, at least 90%, at least 91%, at least 92%, at least 93%, at least 94%, at least 95%, at least 96%, at least 97%, at least 98%, at least 99% or 100% identity to SEQ ID NO:646; and one or more of VL1, VL2, VL3 and VL4 comprises an amino acid sequence having at least 80%, at least 85%, at least 90%, at least 91%, at least 92%, at least 93%, at least 94%, at least 95%, at least 96%, at least 97%, at least 98%, at least 99% or 100% identity to SEQ ID NO:650. In some aspects, one or more of VH1, VH2, VH3, VH4, VL1, VL2, VL3 and VL4 have at least 90% identity with the corresponding amino acid sequences specified above. As used herein, “at least 90% identity” includes at least 91%, 92%, 93%, 94%, 95%, 96%, 97%, 98%, 99% and 100% identity to the recited reference sequence. In some aspects, one or more of VH1, VH2, VH3, VH4, VL1, VL2, VL3 and VL4 comprise or consist of the corresponding amino acid sequences specified above. In some preferred aspects, VH1, VH2, VH3, VH4, VL1, VL2, VL3 and VL4 have at least 90% identity with the corresponding amino acid sequences specified above. As used herein, “at least 90% identity” includes at least 91%, 92%, 93%, 94%, 95%, 96%, 97%, 98%, 99% and 100% identity to the recited reference sequence. In some particularly preferred aspects, VH1, VH2, VH3, VH4, VL1, VL2, VL3 and VL4 comprise or consist of the corresponding amino acid sequences specified above.

[0404] In some aspects, one or more of VH1, VH2, VH3 and VH4 comprises an amino acid sequence having at least 80%, at least 85%, at least 90%, at least 91%, at least 92%, at least 93%, at least 94%, at least 95%, at least 96%, at least 97%, at least 98%, at least 99% or 100% identity to SEQ ID NO:654; and one or more of VL1, VL2, VL3 and VL4 comprises an amino acid sequence having at least 80%, at least 85%, at least 90%, at least 91%, at least 92%, at least 93%, at least 94%, at least 95%, at least 96%, at least 97%, at least 98%, at least 99% or 100% identity to SEQ ID NO:659. In some aspects, one or more of VH1, VH2, VH3, VH4, VL1, VL2, VL3 and VL4 have at least 90% identity with the corresponding amino acid sequences specified above. As used herein, “at least 90% identity” includes at least 91%, 92%, 93%, 94%, 95%, 96%, 97%, 98%, 99% and 100% identity to the recited reference sequence. In some aspects, one or more of VH1, VH2, VH3, VH4, VL1, VL2, VL3 and VL4 comprise or consist of the corresponding amino acid sequences specified above. In some preferred aspects, VH1, VH2, VH3, VH4, VL1, VL2, VL3 and VL4 have at least 90% identity with the corresponding amino acid sequences specified above. As used herein, “at least 90% identity” includes at least 91%, 92%, 93%, 94%, 95%, 96%, 97%, 98%, 99% and 100% identity to the recited reference sequence. In some preferred aspects, VH1, VH2, VH3, VH4, VL1, VL2, VL3 and VL4 comprise or consist of the corresponding amino acid sequences specified above.

[0405] In some aspects, one or more of VH1, VH2, VH3 and VH4 comprises an amino acid sequence having at least 80%, at least 85%, at least 90%, at least 91%, at least 92%, at least 93%, at least 94%, at least 95%, at least 96%, at least 97%, at least 98%, at least 99% or 100% identity to SEQ ID NO:663; and one or more of VL1, VL2, VL3 and VL4 comprises an amino acid sequence having at least 80%, at least 85%, at least 90%, at least 91%, at least 92%, at least 93%, at least 94%, at least 95%, at least 96%, at least 97%, at least 98%, at least 99% or 100% identity to SEQ ID NO:667. In some aspects, one or more of VH1, VH2, VH3, VH4, VL1, VL2, VL3 and VL4 have at least 90% identity with the corresponding amino acid sequences specified above. As used herein, “at least 90% identity” includes at least 91%, 92%, 93%, 94%, 95%, 96%, 97%, 98%, 99% and 100% identity to the recited reference sequence. In some aspects, one or more of VH1, VH2, VH3, VH4, VL1, VL2, VL3 and VL4 comprise or consist of the corresponding amino acid sequences specified above. In some preferred aspects, VH1, VH2, VH3, VH4, VL1, VL2, VL3 and VL4 have at least 90% identity with the corresponding amino acid sequences specified above. As used herein, “at least 90% identity” includes at least 91%, 92%, 93%, 94%, 95%, 96%, 97%, 98%, 99% and 100% identity to the recited reference sequence. In some particularly preferred aspects, VH1, VH2, VH3, VH4, VL1, VL2, VL3 and VL4 comprise or consist of the corresponding amino acid sequences specified above.

[0406] In some aspects, one or more of VH1, VH2, VH3 and VH4 comprises a CDR1 comprising an amino acid sequence having at least 80%, at least 85%, at least 90%, at least 91%, at least 92%, at least 93%, at least 94%, at least 95%, at least 96%, at least 97%, at least 98%, at least 99% or 100% identity to SEQ ID NO:639; a CDR2 comprising an amino acid sequence having at least 80%, at least 85%, at least 90%, at least 91%, at least 92%, at least 93%, at least 94%, at least 95%, at least 96%, at least 97%, at least 98%, at least 99% or 100% identity to SEQ ID NO:640; and/or a CDR3 comprising an amino acid sequence having at least 80%, at least 85%, at least 90%, at least 91%, at least 92%, at least 93%, at least 94%, at least 95%, at least 96%, at least 97%, at least 98%, at least 99% or 100% identity to SEQ ID NO:641; and one or more of VL1, VL2, VL3 and VL4 comprises a CDR1 comprising an amino acid sequence having at least 80%, at least 85%, at least 90%, at least 91%, at least 92%, at least 93%, at least 94%, at least 95%, at least 96%, at least 97%, at least 98%, at least 99% or 100% identity to SEQ ID NO:643; a CDR2 comprising an amino acid sequence having at least 80%, at least 85%, at least 90%, at least 91%, at least 92%, at least 93%, at least 94%, at least 95%, at least 96%, at least 97%, at least 98%, at least 99% or 100% identity to SEQ ID NO:644 (having the sequence of GAS); and/or a CDR3 comprising an amino acid sequence having at least 80%, at least 85%, at least 90%, at least 91%, at least 92%, at least 93%, at least 94%, at least 95%, at least 96%, at least 97%, at least 98%, at least 99% or 100% identity to SEQ ID NO:645. In some aspects, CDR1, CDR2 and CDR3 of one or more of VH1, VH2, VH3, VH4, VL1, VL2, VL3 and VL4 have at least 90% identity with the corresponding amino acid sequences specified above. As used herein, “at least 90% identity” includes at least 91%, 92%, 93%, 94%, 95%, 96%, 97%, 98%, 99% and 100% identity to the recited reference sequence. In some aspects, CDR1, CDR2 and CDR3 of one or more of VH1, VH2, VH3, VH4, VL1, VL2, VL3 and VL4 comprise or consist of the corresponding amino acid sequences specified above. In some preferred aspects, CDR1, CDR2 and CDR3 of VH1, VH2, VH3, VH4, VL1, VL2, VL3 and VL4 have at least 90% identity with the corresponding amino acid sequences specified above. As used herein, “at least 90% identity” includes at least 91%, 92%, 93%, 94%, 95%, 96%, 97%, 98%, 99% and 100% identity to the recited reference sequence. In some particularly preferred aspects, CDR1, CDR2 and CDR3 of VH1, VH2, VH3, VH4, VL1, VL2, VL3 and VL4 comprise or consist of the corresponding amino acid sequences specified above.

[0407] In some aspects, one or more of VH1, VH2, VH3 and VH4 comprises a CDR1 comprising an amino acid sequence having at least 80%, at least 85%, at least 90%, at least 91%, at least 92%, at least 93%, at least 94%, at least 95%, at least 96%, at least 97%, at least 98%, at least 99% or 100% identity to SEQ ID NO:647; a CDR2 comprising an amino acid sequence having at least 80%, at least 85%, at least 90%, at least 91%, at least 92%, at least 93%, at least 94%, at least 95%, at least 96%, at least 97%, at least 98%, at least 99% or 100% identity to SEQ ID NO:648; and/or a CDR3 comprising an amino acid sequence having at least 80%, at least 85%, at least 90%, at least 91%, at least 92%, at least 93%, at least 94%, at least 95%, at least 96%, at least 97%, at least 98%, at least 99% or 100% identity to SEQ ID NO:649; and one or more of VL1, VL2, VL3 and VL4 comprises a CDR1 comprising an amino acid sequence having at least 80%, at least 85%, at least 90%, at least 91%, at least 92%, at least 93%, at least 94%, at least 95%, at least 96%, at least 97%, at least 98%, at least 99% or 100% identity to SEQ ID NO:651; a CDR2 comprising an amino acid sequence having at least 80%, at least 85%, at least 90%, at least 91%, at least 92%, at least 93%, at least 94%, at least 95%, at least 96%, at least 97%, at least 98%, at least 99% or 100% identity to SEQ ID NO:652 (having the sequence of SAS); and/or a CDR3 comprising an amino acid sequence having at least 80%, at least 85%, at least 90%, at least 91%, at least 92%, at least 93%, at least 94%, at least 95%, at least 96%, at least 97%, at least 98%, at least 99% or 100% identity to SEQ ID NO:653. In some aspects, CDR1, CDR2 and CDR3 of one or more of VH1, VH2, VH3, VH4, VL1, VL2, VL3 and VL4 have at least 90% identity with the corresponding amino acid sequences specified above. As used herein, “at least 90% identity” includes at least 91%, 92%, 93%, 94%, 95%, 96%, 97%, 98%, 99% and 100% identity to the recited reference sequence. In some aspects, CDR1, CDR2 and CDR3 of one or more of VH1, VH2, VH3, VH4, VL1, VL2, VL3 and VL4 comprise or consist of the corresponding amino acid sequences specified above. In some preferred aspects, CDR1, CDR2 and CDR3 of VH1, VH2, VH3, VH4, VL1, VL2, VL3 and VL4 have at least 90% identity with the corresponding amino acid sequences specified above. As used herein, “at least 90% identity” includes at least 91%, 92%, 93%, 94%, 95%, 96%, 97%, 98%, 99% and 100% identity to the recited reference sequence. In some particularly preferred aspects, CDR1, CDR2 and CDR3 of VH1, VH2, VH3, VH4, VL1, VL2, VL3 and VL4 comprise or consist of the corresponding amino acid sequences specified above.

[0408] In some aspects, one or more of VH1, VH2, VH3 and VH4 comprises a CDR1 comprising an amino acid sequence having at least 80%, at least 85%, at least 90%, at least 91%, at least 92%, at least 93%, at least 94%, at least 95%, at least 96%, at least 97%, at least 98%, at least 99% or 100% identity to SEQ ID NO:656; a CDR2 comprising an amino acid sequence having at least 80%, at least 85%, at least 90%, at least 91%, at least 92%, at least 93%, at least 94%, at least 95%, at least 96%, at least 97%, at least 98%, at least 99% or 100% identity to SEQ ID NO:657; and/or a CDR3 comprising an amino acid sequence having at least 80%, at least 85%, at least 90%, at least 91%, at least 92%, at least 93%, at least 94%, at least 95%, at least 96%, at least 97%, at least 98%, at least 99% or 100% identity to SEQ ID NO:658; and one or more of VL1, VL2, VL3 and VL4 comprises a CDR1 comprising an amino acid sequence having at least 80%, at least 85%, at least 90%, at least 91%, at least 92%, at least 93%, at least 94%, at least 95%, at least 96%, at least 97%, at least 98%, at least 99% or 100% identity to SEQ ID NO:660; a CDR2 comprising an amino acid sequence having at least 80%, at least 85%, at least 90%, at least 91%, at least 92%, at least 93%, at least 94%, at least 95%, at least 96%, at least 97%, at least 98%, at least 99% or 100% identity to SEQ ID NO:661 (having the sequence of GAS); and/or a CDR3 comprising an amino acid sequence having at least 80%, at least 85%, at least 90%, at least 91%, at least 92%, at least 93%, at least 94%, at least 95%, at least 96%, at least 97%, at least 98%, at least 99% or 100% identity to SEQ ID NO:662. In some aspects, CDR1, CDR2 and CDR3 of one or more of VH1, VH2, VH3, VH4, VL1, VL2, VL3 and VL4 have at least 90% identity with the corresponding amino acid sequences specified above. As used herein, “at least 90% identity” includes at least 91%, 92%, 93%, 94%, 95%, 96%, 97%, 98%, 99% and 100% identity to the recited reference sequence. In some aspects, CDR1, CDR2 and CDR3 of one or more of VH1, VH2, VH3, VH4, VL1, VL2, VL3 and VL4 comprise or consist of the corresponding amino acid sequences specified above. In some preferred aspects, CDR1, CDR2 and CDR3 of VH1, VH2, VH3, VH4, VL1, VL2, VL3 and VL4 have at least 90% identity with the corresponding amino acid sequences specified above. As used herein, “at least 90% identity” includes at least 91%, 92%, 93%, 94%, 95%, 96%, 97%, 98%, 99% and 100% identity to the recited reference sequence. In some particularly preferred aspects, CDR1, CDR2 and CDR3 of VH1, VH2, VH3, VH4, VL1, VL2, VL3 and VL4 comprise or consist of the corresponding amino acid sequences specified above.

[0409] In some aspects, one or more of VH1, VH2, VH3 and VH4 comprises a CDR1 comprising an amino acid sequence having at least 80%, at least 85%, at least 90%, at least 91%, at least 92%, at least 93%, at least 94%, at least 95%, at least 96%, at least 97%, at least 98%, at least 99% or 100% identity to SEQ ID NO:664; a CDR2 comprising an amino acid sequence having at least 80%, at least 85%, at least 90%, at least 91%, at least 92%, at least 93%, at least 94%, at least 95%, at least 96%, at least 97%, at least 98%, at least 99% or 100% identity to SEQ ID NO:665; and/or a CDR3 comprising an amino acid sequence having at least 80%, at least 85%, at least 90%, at least 91%, at least 92%, at least 93%, at least 94%, at least 95%, at least 96%, at least 97%, at least 98%, at least 99% or 100% identity to SEQ ID NO:666; and one or more of VL1, VL2, VL3 and VL4 comprises a CDR1 comprising an amino acid sequence having at least 80%, at least 85%, at least 90%, at least 91%, at least 92%, at least 93%, at least 94%, at least 95%, at least 96%, at least 97%, at least 98%, at least 99% or 100% identity to SEQ ID NO:668; a CDR2 comprising an amino acid sequence having at least 80%, at least 85%, at least 90%, at least 91%, at least 92%, at least 93%, at least 94%, at least 95%, at least 96%, at least 97%, at least 98%, at least 99% or 100% identity to SEQ ID NO:669 (having the sequence of DAS); and/or a CDR3 comprising an amino acid sequence having at least 80%, at least 85%, at least 90%, at least 91%, at least 92%, at least 93%, at least 94%, at least 95%, at least 96%, at least 97%, at least 98%, at least 99% or 100% identity to SEQ ID NO:670. In some aspects, CDR1, CDR2 and CDR3 of one or more of VH1, VH2, VH3, VH4, VL1, VL2, VL3 and VL4 have at least 90% identity with the corresponding amino acid sequences specified above. In some aspects, CDR1, CDR2 and CDR3 of one or more of VH1, VH2, VH3, VH4, VL1, VL2, VL3 and VL4 comprise or consist of the corresponding amino acid sequences specified above. As used herein, “at least 90% identity” includes at least 91%, 92%, 93%, 94%, 95%, 96%, 97%, 98%, 99% and 100% identity to the recited reference sequence. In some preferred aspects, CDR1, CDR2 and CDR3 of VH1, VH2, VH3, VH4, VL1, VL2, VL3 and VL4 have at least 90% identity with the corresponding amino acid sequences specified above. In some particularly preferred aspects, CDR1, CDR2 and CDR3 of VH1, VH2, VH3, VH4, VL1, VL2, VL3 and VL4 comprise or consist of the corresponding amino acid sequences specified above.

[0410] In some aspects, VH1, VH2, VH3 and VH4 each comprise the same CDR1, CDR2 and CDR3 regions. In some aspects, VL1, VL2, VL3 and VL4 each comprise the same CDR1, CDR2 and CDR3 regions. In some aspects, VH1, VH2, VH3 and VH4 each comprise the same CDR1, CDR2 and CDR3 regions, and VL1, VL2, VL3 and VL4 each comprise the same CDR1, CDR2 and CDR3 regions.

[0411] In some aspects, VH1, VH2, VH3 and VH4 each comprise a CDR1 comprising an amino acid sequence having at least 80%, at least 85%, at least 90%, at least 91%, at least 92%, at least 93%, at least 94%, at least 95%, at least 96%, at least 97%, at least 98%, at least 99% or 100% identity to any one of SEQ ID NOs:43, 51, 59, 67, 75, 171, 179, 187, 264, 272, 280, 288, 513, 521, 529, 537, 545, 553, 561, 569, 577, 585, 593, 601, 609, 617, 639, 647, 656 and 664; a CDR2 comprising an amino acid sequence having at least 80%, at least 85%, at least 90%, at least 91%, at least 92%, at least 93%, at least 94%, at least 95%, at least 96%, at least 97%, at least 98%, at least 99% or 100% identity to any one of SEQ ID NOs:44, 52, 60, 68, 76, 172, 180, 188, 265, 273, 281, 289, 514, 522, 530, 538, 546, 554, 562, 570, 578, 586, 594, 602, 610, 618, 640, 648, 657 and 665; and a CDR3 comprising an amino acid sequence having at least 80%, at least 85%, at least 90%, at least 91%, at least 92%, at least 93%, at least 94%, at least 95%, at least 96%, at least 97%, at least 98%, at least 99% or 100% identity to any one of SEQ ID NOs:45, 53, 61, 69, 77, 173, 181, 189, 266, 274, 282, 290, 515, 523, 531, 539, 547, 555, 563, 571, 579, 587, 595, 603, 611, 619, 641, 649, 658 and 666. In some preferred aspects, CDR1, CDR2 and CDR3 of VH1, VH2, VH3 and VH4 each have at least 90% identity with a corresponding amino acid sequence specified above. As used herein, “at least 90% identity” includes at least 91%, 92%, 93%, 94%, 95%, 96%, 97%, 98%, 99% and 100% identity to the recited reference sequence. In some particularly preferred aspects, CDR1, CDR2 and CDR3 of VH1, VH2, VH3, and VH4 each comprise or consist of a corresponding amino acid sequence specified above.

[0412] In some aspects, VL1, VL2, VL3 and VL4 each comprise a CDR1 comprising an amino acid sequence having at least 80%, at least 85%, at least 90%, at least 91%, at least 92%, at least 93%, at least 94%, at least 95%, at least 96%, at least 97%, at least 98%, at least 99% or 100% identity to any one of SEQ ID NOs:39, 47, 55, 63, 71, 167, 175, 183, 260, 268, 276, 284, 517, 525, 533, 541, 549, 557, 565, 573, 581, 589, 597, 605, 613, 621, 643, 651, 660 and 668; a CDR2 comprising an amino acid sequence having at least 80%, at least 85%, at least 90%, at least 91%, at least 92%, at least 93%, at least 94%, at least 95%, at least 96%, at least 97%, at least 98%, at least 99% or 100% identity to any one of SEQ ID NOs:40, 48, 56, 64, 72, 168, 176, 184, 261, 269, 277 (having the sequence of LGS), 285, 518 (having the sequence of DAS), 526 (having the sequence of DVS), 534 (having the sequence of EDS), 542 (having the sequence of KDS), 550 (having the sequence of DAS), 558 (having the sequence of AAS), 566 (having the sequence of GAS), 574 (having the sequence of DDS), 582 (having the sequence of KDS), 590 (having the sequence of SAS), 598 (having the sequence of SAS), 606 (having the sequence of GAS), 614 (having the sequence of GAS), 622 (having the sequence of GAS), 644 (having the sequence of GAS), 652 (having the sequence of SAS), 661 (having the sequence of GAS) and 669 (having the sequence of DAS); and a CDR3 comprising an amino acid sequence having at least 80%, at least 85%, at least 90%, at least 91%, at least 92%, at least 93%, at least 94%, at least 95%, at least 96%, at least 97%, at least 98%, at least 99% or 100% identity to any one of SEQ ID NOs:41, 49, 57, 65, 73, 169, 177, 185, 262, 270, 278, 286, 519, 527, 535, 543, 551, 559, 567, 575, 583, 591, 599, 607, 615, 623, 645, 653, 662 and 670. In some preferred aspects, CDR1, CDR2 and CDR3 of VL1, VL2, VL3 and VL4 each have at least 90% identity with a corresponding amino acid sequence specified above. As used herein, “at least 90% identity” includes at least 91%, 92%, 93%, 94%, 95%, 96%, 97%, 98%, 99% and 100% identity to the recited reference sequence. In some particularly preferred aspects, CDR1, CDR2 and CDR3 of VL1, VL2, VL3 and VL4 each comprise or consist of a corresponding amino acid sequence specified above.

[0413] In some aspects, VH1, VH2, VH3 and VH4 each comprise a CDR1 comprising an amino acid sequence having at least 80%, at least 85%, at least 90%, at least 91%, at least 92%, at least 93%, at least 94%, at least 95%, at least 96%, at least 97%, at least 98%, at least 99% or 100% identity to any one of SEQ ID NOs:43, 51, 59, 67, 75, 171, 179, 187, 264, 272, 280, 288, 513, 521, 529, 537, 545, 553, 561, 569, 577, 585, 593, 601, 609, 617, 639, 647, 656 and 664; a CDR2 comprising an amino acid sequence having at least 80%, at least 85%, at least 90%, at least 91%, at least 92%, at least 93%, at least 94%, at least 95%, at least 96%, at least 97%, at least 98%, at least 99% or 100% identity to any one of SEQ ID NOs:44, 52, 60, 68, 76, 172, 180, 188, 265, 273, 281, 289, 514, 522, 530, 538, 546, 554, 562, 570, 578, 586, 594, 602, 610, 618, 640, 648, 657 and 665; and a CDR3 comprising an amino acid sequence having at least 80%, at least 85%, at least 90%, at least 91%, at least 92%, at least 93%, at least 94%, at least 95%, at least 96%, at least 97%, at least 98%, at least 99% or 100% identity to any one of SEQ ID NOs:45, 53, 61, 69, 77, 173, 181, 189, 266, 274, 282, 290, 515, 523, 531, 539, 547, 555, 563, 571, 579, 587, 595, 603, 611, 619, 641, 649, 658 and 666; and VL1, VL2, VL3 and VL4 each comprise a CDR1 comprising an amino acid sequence having at least 80%, at least 85%, at least 90%, at least 91%, at least 92%, at least 93%, at least 94%, at least 95%, at least 96%, at least 97%, at least 98%, at least 99% or 100% identity to any one of SEQ ID NOs:39, 47, 55, 63, 71, 167, 175, 183, 260, 268, 276, 284, 517, 525, 533, 541, 549, 557, 565, 573, 581, 589, 597, 605, 613, 621, 643, 651, 660 and 668; a CDR2 comprising an amino acid sequence having at least 80%, at least 85%, at least 90%, at least 91%, at least 92%, at least 93%, at least 94%, at least 95%, at least 96%, at least 97%, at least 98%, at least 99% or 100% identity to any one of SEQ ID NOs:40, 48, 56, 64, 72, 168, 176, 184, 261, 269, 277 (having the sequence of LGS), 285, 518 (having the sequence of DAS), 526 (having the sequence of DVS), 534 (having the sequence of EDS), 542 (having the sequence of KDS), 550 (having the sequence of DAS), 558 (having the sequence of AAS), 566 (having the sequence of GAS), 574 (having the sequence of DDS), 582 (having the sequence of KDS), 590 (having the sequence of SAS), 598 (having the sequence of SAS), 606 (having the sequence of GAS), 614 (having the sequence of GAS), 622 (having the sequence of GAS), 644 (having the sequence of GAS), 652 (having the sequence of SAS), 661 (having the sequence of GAS) and 669 (having the sequence of DAS); and a CDR3 comprising an amino acid sequence having at least 80%, at least 85%, at least 90%, at least 91%, at least 92%, at least 93%, at least 94%, at least 95%, at least 96%, at least 97%, at least 98%, at least 99% or 100% identity to any one of SEQ ID NOs:41, 49, 57, 65, 73, 169, 177, 185, 262, 270, 278, 286, 519, 527, 535, 543, 551, 559, 567, 575, 583, 591, 599, 607, 615, 623, 645, 653, 662 and 670. In some preferred aspects, CDR1, CDR2 and CDR3 of VH1, VH2, VH3, VH4, VL1, VL2, VL3 and VL4 each have at least 90% identity with a corresponding amino acid sequence specified above. As used herein, “at least 90% identity” includes at least 91%, 92%, 93%, 94%, 95%, 96%, 97%, 98%, 99% and 100% identity to the recited reference sequence. In some particularly preferred aspects, CDR1, CDR2 and CDR3 of VH1, VH2, VH3, VH4, VL1, VL2, VL3 and VL4 each comprise or consist of a corresponding amino acid sequence specified above.

[0414] In some aspects, VH1, VH2, VH3 and VH4 each comprise a CDR1 comprising an amino acid sequence having at least 80%, at least 85%, at least 90%, at least 91%, at least 92%, at least 93%, at least 94%, at least 95%, at least 96%, at least 97%, at least 98%, at least 99% or 100% identity to SEQ ID NO:43; a CDR2 comprising an amino acid sequence having at least 80%, at least 85%, at least 90%, at least 91%, at least 92%, at least 93%, at least 94%, at least 95%, at least 96%, at least 97%, at least 98%, at least 99% or 100% identity to SEQ ID NO:44; and a CDR3 comprising an amino acid sequence having at least 80%, at least 85%, at least 90%, at least 91%, at least 92%, at least 93%, at least 94%, at least 95%, at least 96%, at least 97%, at least 98%, at least 99% or 100% identity to SEQ ID NO:45; and VL1, VL2, VL3 and VL4 each comprise a CDR1 comprising an amino acid sequence having at least 80%, at least 85%, at least 90%, at least 91%, at least 92%, at least 93%, at least 94%, at least 95%, at least 96%, at least 97%, at least 98%, at least 99% or 100% identity to SEQ ID NO:39; a CDR2 comprising an amino acid sequence having at least 80%, at least 85%, at least 90%, at least 91%, at least 92%, at least 93%, at least 94%, at least 95%, at least 96%, at least 97%, at least 98%, at least 99% or 100% identity to SEQ ID NO:40 (having the sequence of GAS); and a CDR3 comprising an amino acid sequence having at least 80%, at least 85%, at least 90%, at least 91%, at least 92%, at least 93%, at least 94%, at least 95%, at least 96%, at least 97%, at least 98%, at least 99% or 100% identity to SEQ ID NO:41. In some preferred aspects, CDR1, CDR2 and CDR3 of VH1, VH2, VH3, VH4, VL1, VL2, VL3 and VL4 each have at least 90% identity with a corresponding amino acid sequence specified above. As used herein, “at least 90% identity” includes at least 91%, 92%, 93%, 94%, 95%, 96%, 97%, 98%, 99% and 100% identity to the recited reference sequence. In some particularly preferred aspects, CDR1, CDR2 and CDR3 of VH1, VH2, VH3, VH4, VL1, VL2, VL3 and VL4 each comprise or consist of a corresponding amino acid sequence specified above.

[0415] In some aspects, VH1, VH2, VH3 and VH4 each comprise a CDR1 comprising an amino acid sequence having at least 80%, at least 85%, at least 90%, at least 91%, at least 92%, at least 93%, at least 94%, at least 95%, at least 96%, at least 97%, at least 98%, at least 99% or 100% identity to SEQ ID NO:51; a CDR2 comprising an amino acid sequence having at least 80%, at least 85%, at least 90%, at least 91%, at least 92%, at least 93%, at least 94%, at least 95%, at least 96%, at least 97%, at least 98%, at least 99% or 100% identity to SEQ ID NO:52; and a CDR3 comprising an amino acid sequence having at least 80%, at least 85%, at least 90%, at least 91%, at least 92%, at least 93%, at least 94%, at least 95%, at least 96%, at least 97%, at least 98%, at least 99% or 100% identity to SEQ ID NO:53; and VL1, VL2, VL3 and VL4 each comprise a CDR1 comprising an amino acid sequence having at least 80%, at least 85%, at least 90%, at least 91%, at least 92%, at least 93%, at least 94%, at least 95%, at least 96%, at least 97%, at least 98%, at least 99% or 100% identity to SEQ ID NO:47; a CDR2 comprising an amino acid sequence having at least 80%, at least 85%, at least 90%, at least 91%, at least 92%, at least 93%, at least 94%, at least 95%, at least 96%, at least 97%, at least 98%, at least 99% or 100% identity to SEQ ID NO:48 (having the sequence of GAS); and a CDR3 comprising an amino acid sequence having at least 80%, at least 85%, at least 90%, at least 91%, at least 92%, at least 93%, at least 94%, at least 95%, at least 96%, at least 97%, at least 98%, at least 99% or 100% identity to SEQ ID NO:49. In some preferred aspects, CDR1, CDR2 and CDR3 of VH1, VH2, VH3, VH4, VL1, VL2, VL3 and VL4 each have at least 90% identity with a corresponding amino acid sequence specified above. As used herein, “at least 90% identity” includes at least 91%, 92%, 93%, 94%, 95%, 96%, 97%, 98%, 99% and 100% identity to the recited reference sequence. In some particularly preferred aspects, CDR1, CDR2 and CDR3 of VH1, VH2, VH3, VH4, VL1, VL2, VL3 and VL4 each comprise or consist of a corresponding amino acid sequence specified above.

[0416] In some aspects, VH1, VH2, VH3 and VH4 each comprise the same heavy chain variable region. In some aspects, VL1, VL2, VL3 and VL4 each comprise the same light chain variable region. In some aspects, VH1, VH2, VH3 and VH4 each comprise the same heavy chain variable region, and VL1, VL2, VL3 and VL4 each comprise the same light chain variable region.

[0417] In some aspects, VH1, VH2, VH3 and VH4 each comprise the same amino acid sequence having at least 80%, at least 85%, at least 90%, at least 91%, at least 92%, at least 93%, at least 94%, at least 95%, at least 96%, at least 97%, at least 98%, at least 99% or 100% identity to any one of SEQ ID NOs:42, 50, 58, 66, 74, 170, 178, 186, 263, 271, 279, 287, 510, 512, 520, 528, 536, 544, 552, 560, 568, 576, 584, 592, 600, 608, 616, 624, 626, 628, 630, 632, 634, 636, 638, 646, 654, 663, 779, 781, 785 and 787. In some aspects, VL1, VL2, VL3 and VL4 each comprise the same amino acid sequence having at least 80%, at least 85%, at least 90%, at least 91%, at least 92%, at least 93%, at least 94%, at least 95%, at least 96%, at least 97%, at least 98%, at least 99% or 100% identity to any one of SEQ ID NOs:38, 46, 54, 62, 70, 166, 174, 182, 259, 267, 275, 283, 508, 509, 511, 516, 524, 532, 540, 548, 556, 564, 572, 580, 588, 596, 604, 612, 620, 625, 627, 629, 631, 633, 635, 637, 642, 650, 659 and 667. In some aspects, VH1, VH2, VH3 and VH4 each comprise the same amino acid sequence having at least 80%, at least 85%, at least 90%, at least 91%, at least 92%, at least 93%, at least 94%, at least 95%, at least 96%, at least 97%, at least 98%, at least 99% or 100% identity to any one of SEQ ID NOs:42, 50, 58, 66, 74, 170, 178, 186, 263, 271, 279, 287, 510, 512, 520, 528, 536, 544, 552, 560, 568, 576, 584, 592, 600, 608, 616, 624, 626, 628, 630, 632, 634, 636, 638, 646, 654, 663, 779, 781, 785 and 787, and VL1, VL2, VL3 and VL4 each comprise the same amino acid sequence having at least 80%, at least 85%, at least 90%, at least 91%, at least 92%, at least 93%, at least 94%, at least 95%, at least 96%, at least 97%, at least 98%, at least 99% or 100% identity to any one of SEQ ID NOs:38, 46, 54, 62, 70, 166, 174, 182, 259, 267, 275, 283, 508, 509, 511, 516, 524, 532, 540, 548, 556, 564, 572, 580, 588, 596, 604, 612, 620, 625, 627, 629, 631, 633, 635, 637, 642, 650, 659 and 667. In some aspects, the sequence has a mutation at N62, for example, N62Q or N62Q at, for example, SEQ ID NO:279. In some preferred aspects, VH1, VH2, VH3, VH4, VL1, VL2, VL3 and VL4 each have at least 90% identity with a corresponding amino acid sequence specified above, optionally with a mutation at N62 as described above. As used herein, “at least 90% identity” includes at least 91%, 92%, 93%, 94%, 95%, 96%, 97%, 98%, 99% and 100% identity to the recited reference sequence. In some particularly preferred aspects, VH1, VH2, VH3, VH4, VL1, VL2, VL3 and VL4 each comprise or consist of a corresponding amino acid sequence specified above, optionally with a mutation at N62 as described above.

[0418] In some aspects, VH1, VH2, VH3 and VH4 each comprise the same amino acid sequence having at least 80%, at least 85%, at least 90%, at least 91%, at least 92%, at least 93%, at least 94%, at least 95%, at least 96%, at least 97%, at least 98%, at least 99% or 100% identity to SEQ ID NO:42. In some aspects, VL1, VL2, VL3 and VL4 each comprise the same amino acid sequence having at least 80%, at least 85%, at least 90%, at least 91%, at least 92%, at least 93%, at least 94%, at least 95%, at least 96%, at least 97%, at least 98%, at least 99% or 100% identity to SEQ ID NO:38. In some aspects, VH1, VH2, VH3 and VH4 each comprise the same amino acid sequence having at least 80%, at least 85%, at least 90%, at least 91%, at least 92%, at least 93%, at least 94%, at least 95%, at least 96%, at least 97%, at least 98%, at least 99% or 100% identity to SEQ ID NO:42, and VL1, VL2, VL3 and VL4 each comprise the same amino acid sequence having at least 80%, at least 85%, at least 90%, at least 91%, at least 92%, at least 93%, at least 94%, at least 95%, at least 96%, at least 97%, at least 98%, at least 99% or 100% identity to SEQ ID NO:38. In some preferred aspects, VH1, VH2, VH3, VH4, VL1, VL2, VL3 and VL4 each have at least 90% identity with the corresponding amino acid sequence specified above. As used herein, “at least 90% identity” includes at least 91%, 92%, 93%, 94%, 95%, 96%, 97%, 98%, 99% and 100% identity to the recited reference sequence. In some particularly preferred aspects, VH1, VH2, VH3, VH4, VL1, VL2, VL3 and VL4 each comprise or consist of the corresponding amino acid sequence specified above.

[0419] In some aspects, VH1, VH2, VH3 and VH4 each comprise the same amino acid sequence having at least 80%, at least 85%, at least 90%, at least 91%, at least 92%, at least 93%, at least 94%, at least 95%, at least 96%, at least 97%, at least 98%, at least 99% or 100% identity to SEQ ID NO:50. In some aspects, VL1, VL2, VL3 and VL4 each comprise the same amino acid sequence having at least 80%, at least 85%, at least 90%, at least 91%, at least 92%, at least 93%, at least 94%, at least 95%, at least 96%, at least 97%, at least 98%, at least 99% or 100% identity to SEQ ID NO:46. In some aspects, VH1, VH2, VH3 and VH4 each comprise the same amino acid sequence having at least 80%, at least 85%, at least 90%, at least 91%, at least 92%, at least 93%, at least 94%, at least 95%, at least 96%, at least 97%, at least 98%, at least 99% or 100% identity to SEQ ID NO:50, and VL1, VL2, VL3 and VL4 each comprise the same amino acid sequence having at least 80%, at least 85%, at least 90%, at least 91%, at least 92%, at least 93%, at least 94%, at least 95%, at least 96%, at least 97%, at least 98%, at least 99% or 100% identity to SEQ ID NO:46. In some preferred aspects, VH1, VH2, VH3, VH4, VL1, VL2, VL3 and VL4 each have at least 90% identity with the corresponding amino acid sequence specified above. As used herein, “at least 90% identity” includes at least 91%, 92%, 93%, 94%, 95%, 96%, 97%, 98%, 99% and 100% identity to the recited reference sequence. In some particularly preferred aspects, VH1, VH2, VH3, VH4, VL1, VL2, VL3 and VL4 each comprise or consist of the corresponding amino acid sequence specified above.

[0420] In some aspects, VH1 comprises the same CDR1, CDR2 and CDR3 regions as VH3. In some aspects, VL1 comprises the same CDR1, CDR2 and CDR3 regions as VL3. In some aspects, VH1 comprises the same CDR1, CDR2 and CDR3 regions as VH3, and VL1 comprises the same CDR1, CDR2 and CDR3 regions as VL3.

[0421] In some aspects, VH2 comprises the same CDR1, CDR2 and CDR3 regions as VH4. In some aspects, VL2 comprises the same CDR1, CDR2 and CDR3 regions as VL4. In some aspects, VH2 comprises the same CDR1, CDR2 and CDR3 regions as VH4, and VL2 comprises the same CDR1, CDR2 and CDR3 regions as VL4.

[0422] In some aspects, VH1 comprises the same CDR1, CDR2 and CDR3 regions as VH3, VL1 comprises the same CDR1, CDR2 and CDR3 regions as VL3, VH2 comprises the same CDR1, CDR2 and CDR3 regions as VH4, and VL2 comprises the same CDR1, CDR2 and CDR3 regions as VL4.

[0423] In some aspects, VH1 CDR1 and VH3 CDR1 each comprise the same amino acid sequence having at least 80%, at least 85%, at least 90%, at least 91%, at least 92%, at least 93%, at least 94%, at least 95%, at least 96%, at least 97%, at least 98%, at least 99% or 100% identity to any one of SEQ ID NOs:43, 51, 59, 67, 75, 171, 179, 187, 264, 272, 280, 288, 513, 521, 529, 537, 545, 553, 561, 569, 577, 585, 593, 601, 609, 617, 639, 647, 656 and 664. In some aspects, VH1 CDR2 and VH3 CDR2 each comprise the same amino acid sequence having at least 80%, at least 85%, at least 90%, at least 91%, at least 92%, at least 93%, at least 94%, at least 95%, at least 96%, at least 97%, at least 98%, at least 99% or 100% identity to any one of SEQ ID NOs:44, 52, 60, 68, 76, 172, 180, 188, 265, 273, 281, 289, 514, 522, 530, 538, 546, 554, 562, 570, 578, 586, 594, 602, 610, 618, 640, 648, 657 and 665. In some aspects, VH1 CDR3 and VH3 CDR3 each comprise the same amino acid sequence having at least 80%, at least 85%, at least 90%, at least 91%, at least 92%, at least 93%, at least 94%, at least 95%, at least 96%, at least 97%, at least 98%, at least 99% or 100% identity to any one of SEQ ID NOs:45, 53, 61, 69, 77, 173, 181, 189, 266, 274, 282, 290, 515, 523, 531, 539, 547, 555, 563, 571, 579, 587, 595, 603, 611, 619, 641, 649, 658 and 666. In some preferred aspects, CDR1, CDR2 and CDR3 of VH1 and VH3 each have at least 90% identity with a corresponding amino acid sequence specified above. As used herein, “at least 90% identity” includes at least 91%, 92%, 93%, 94%, 95%, 96%, 97%, 98%, 99% and 100% identity to the recited reference sequence. In some particularly preferred aspects, CDR1, CDR2 and CDR3 of VH1 and VH3 each comprise or consist of a corresponding amino acid sequence specified above.

[0424] In some aspects, VH1 CDR1 and VH3 CDR1 each comprise the same amino acid sequence having at least 80%, at least 85%, at least 90%, at least 91%, at least 92%, at least 93%, at least 94%, at least 95%, at least 96%, at least 97%, at least 98%, at least 99% or 100% identity to any one of SEQ ID NOs:43, 51, 59, 67, 75, 171, 179, 187, 264, 272, 280, 288, 513, 521, 529, 537, 545, 553, 561, 569, 577, 585, 593, 601, 609, 617, 639, 647, 656 and 664; VH1 CDR2 and VH3 CDR2 each comprise the same amino acid sequence having at least 80%, at least 85%, at least 90%, at least 91%, at least 92%, at least 93%, at least 94%, at least 95%, at least 96%, at least 97%, at least 98%, at least 99% or 100% identity to any one of SEQ ID NOs:44, 52, 60, 68, 76, 172, 180, 188, 265, 273, 281, 289, 514, 522, 530, 538, 546, 554, 562, 570, 578, 586, 594, 602, 610, 618, 640, 648, 657 and 665; and VH1 CDR3 and VH3 CDR3 each comprise the same amino acid sequence having at least 80%, at least 85%, at least 90%, at least 91%, at least 92%, at least 93%, at least 94%, at least 95%, at least 96%, at least 97%, at least 98%, at least 99% or 100% identity to any one of SEQ ID NOs:45, 53, 61, 69, 77, 173, 181, 189, 266, 274, 282, 290, 515, 523, 531, 539, 547, 555, 563, 571, 579, 587, 595, 603, 611, 619, 641, 649, 658 and 666. In some preferred aspects, CDR1, CDR2 and CDR3 of VH1 and VH3 each have at least 90% identity with a corresponding amino acid sequence specified above. As used herein, “at least 90% identity” includes at least 91%, 92%, 93%, 94%, 95%, 96%, 97%, 98%, 99% and 100% identity to the recited reference sequence. In some particularly preferred aspects, CDR1, CDR2 and CDR3 of VH1 and VH3 each comprise or consist of a corresponding amino acid sequence specified above.

[0425] In some aspects, VL1 CDR1 and VL3 CDR1 each comprise the same amino acid sequence having at least 80%, at least 85%, at least 90%, at least 91%, at least 92%, at least 93%, at least 94%, at least 95%, at least 96%, at least 97%, at least 98%, at least 99% or 100% identity to any one of SEQ ID NOs:39, 47, 55, 63, 71, 167, 175, 183, 260, 268, 276, 284, 517, 525, 533, 541, 549, 557, 565, 573, 581, 589, 597, 605, 613, 621, 643, 651, 660 and 668. In some aspects, VL1 CDR2 and VL3 CDR2 each comprise the same amino acid sequence having at least 80%, at least 85%, at least 90%, at least 91%, at least 92%, at least 93%, at least 94%, at least 95%, at least 96%, at least 97%, at least 98%, at least 99% or 100% identity to any one of SEQ ID NOs:40, 48, 56, 64, 72, 168, 176, 184, 261, 269, 277 (having the sequence of LGS), 285, 518 (having the sequence of DAS), 526 (having the sequence of DVS), 534 (having the sequence of EDS), 542 (having the sequence of KDS), 550 (having the sequence of DAS), 558 (having the sequence of AAS), 566 (having the sequence of GAS), 574 (having the sequence of DDS), 582 (having the sequence of KDS), 590 (having the sequence of SAS), 598 (having the sequence of SAS), 606 (having the sequence of GAS), 614 (having the sequence of GAS), 622 (having the sequence of GAS), 644 (having the sequence of GAS), 652 (having the sequence of SAS), 661 (having the sequence of GAS) and 669 (having the sequence of DAS). In some aspects, VL1 CDR3 and VL3 CDR3 each comprise the same amino acid sequence having at least 80%, at least 85%, at least 90%, at least 91%, at least 92%, at least 93%, at least 94%, at least 95%, at least 96%, at least 97%, at least 98%, at least 99% or 100% identity to any one of SEQ ID NOs:41, 49, 57, 65, 73, 169, 177, 185, 262, 270, 278, 286, 519, 527, 535, 543, 551, 559, 567, 575, 583, 591, 599, 607, 615, 623, 645, 653, 662 and 670. In some preferred aspects, CDR1, CDR2 and CDR3 of VL1 and VL3 each have at least 90% identity with a corresponding amino acid sequence specified above. As used herein, “at least 90% identity” includes at least 91%, 92%, 93%, 94%, 95%, 96%, 97%, 98%, 99% and 100% identity to the recited reference sequence. In some particularly preferred aspects, CDR1, CDR2 and CDR3 of VL1 and VL3 each comprise or consist of a corresponding amino acid sequence specified above.

[0426] In some aspects, VL1 CDR1 and VL3 CDR1 each comprise the same amino acid sequence having at least 80%, at least 85%, at least 90%, at least 91%, at least 92%, at least 93%, at least 94%, at least 95%, at least 96%, at least 97%, at least 98%, at least 99% or 100% identity to any one of SEQ ID NOs:39, 47, 55, 63, 71, 167, 175, 183, 260, 268, 276, 284, 517, 525, 533, 541, 549, 557, 565, 573, 581, 589, 597, 605, 613, 621, 643, 651, 660 and 668; VL1 CDR2 and VL3 CDR2 each comprise the same amino acid sequence having at least 80%, at least 85%, at least 90%, at least 91%, at least 92%, at least 93%, at least 94%, at least 95%, at least 96%, at least 97%, at least 98%, at least 99% or 100% identity to any one of SEQ ID NOs:40, 48, 56, 64, 72, 168, 176, a184, 261, 269, 277 (having the sequence of LGS), 285, 518 (having the sequence of DAS), 526 (having the sequence of DVS), 534 (having the sequence of EDS), 542 (having the sequence of KDS), 550 (having the sequence of DAS), 558 (having the sequence of AAS), 566 (having the sequence of GAS), 574 (having the sequence of DDS), 582 (having the sequence of KDS), 590 (having the sequence of SAS), 598 (having the sequence of SAS), 606 (having the sequence of GAS), 614 (having the sequence of GAS), 622 (having the sequence of GAS), 644 (having the sequence of GAS), 652 (having the sequence of SAS), 661 (having the sequence of GAS) and 669 (having the sequence of DAS); and VL1 CDR3 and VL3 CDR3 each comprise the same amino acid sequence having at least 80%, at least 85%, at least 90%, at least 91%, at least 92%, at least 93%, at least 94%, at least 95%, at least 96%, at least 97%, at least 98%, at least 99% or 100% identity to any one of SEQ ID NOs:41, 49, 57, 65, 73, 169, 177, 185, 262, 270, 278, 286, 519, 527, 535, 543, 551, 559, 567, 575, 583, 591, 599, 607, 615, 623, 645, 653, 662 and 670. In some preferred aspects, CDR1, CDR2 and CDR3 of VL1 and VL3 each have at least 90% identity with a corresponding amino acid sequence specified above. As used herein, “at least 90% identity” includes at least 91%, 92%, 93%, 94%, 95%, 96%, 97%, 98%, 99% and 100% identity to the recited reference sequence. In some particularly preferred aspects, CDR1, CDR2 and CDR3 of VL1 and VL3 each comprise or consist of a corresponding amino acid sequence specified above.

[0427] In some aspects, VH1 CDR1 and VH3 CDR1 each comprise the same amino acid sequence having at least 80%, at least 85%, at least 90%, at least 91%, at least 92%, at least 93%, at least 94%, at least 95%, at least 96%, at least 97%, at least 98%, at least 99% or 100% identity to any one of SEQ ID NOs:43, 51, 59, 67, 75, 171, 179, 187, 264, 272, 280, 288, 513, 521, 529, 537, 545, 553, 561, 569, 577, 585, 593, 601, 609, 617, 639, 647, 656 and 664; VH1 CDR2 and VH3 CDR2 each comprise the same amino acid sequence having at least 80%, at least 85%, at least 90%, at least 91%, at least 92%, at least 93%, at least 94%, at least 95%, at least 96%, at least 97%, at least 98%, at least 99% or 100% identity to any one of SEQ ID NOs:44, 52, 60, 68, 76, 172, 180, 188, 265, 273, 281, 289, 514, 522, 530, 538, 546, 554, 562, 570, 578, 586, 594, 602, 610, 618, 640, 648, 657 and 665; VH1 CDR3 and VH3 CDR3 each comprise the same amino acid sequence having at least 80%, at least 85%, at least 90%, at least 91%, at least 92%, at least 93%, at least 94%, at least 95%, at least 96%, at least 97%, at least 98%, at least 99% or 100% identity to any one of SEQ ID NOs:45, 53, 61, 69, 77, 173, 181, 189, 266, 274, 282, 290, 515, 523, 531, 539, 547, 555, 563, 571, 579, 587, 595, 603, 611, 619, 641, 649, 658 and 666; VL1 CDR1 and VL3 CDR1 each comprise the same amino acid sequence having at least 80%, at least 85%, at least 90%, at least 91%, at least 92%, at least 93%, at least 94%, at least 95%, at least 96%, at least 97%, at least 98%, at least 99% or 100% identity to any one of SEQ ID NOs:39, 47, 55, 63, 71, 167, 175, 183, 260, 268, 276, 284, 517, 525, 533, 541, 549, 557, 565, 573, 581, 589, 597, 605, 613, 621, 643, 651, 660 and 668; VL1 CDR2 and VL3 CDR2 each comprise the same amino acid sequence having at least 80%, at least 85%, at least 90%, at least 91%, at least 92%, at least 93%, at least 94%, at least 95%, at least 96%, at least 97%, at least 98%, at least 99% or 100% identity to any one of SEQ ID NOs:40, 48, 56, 64, 72, 168, 176, 184, 261, 269, 277 (having the sequence of LGS), 285, 518 (having the sequence of DAS), 526 (having the sequence of DVS), 534 (having the sequence of EDS), 542 (having the sequence of KDS), 550 (having the sequence of DAS), 558 (having the sequence of AAS), 566 (having the sequence of GAS), 574 (having the sequence of DDS), 582 (having the sequence of KDS), 590 (having the sequence of SAS), 598 (having the sequence of SAS), 606 (having the sequence of GAS), 614 (having the sequence of GAS), 622 (having the sequence of GAS), 644 (having the sequence of GAS), 652 (having the sequence of SAS), 661 (having the sequence of GAS) and 669 (having the sequence of DAS); and VL1 CDR3 and VL3 CDR3 each comprise the same amino acid sequence having at least 80%, at least 85%, at least 90%, at least 91%, at least 92%, at least 93%, at least 94%, at least 95%, at least 96%, at least 97%, at least 98%, at least 99% or 100% identity to any one of SEQ ID NOs:41, 49, 57, 65, 73, 169, 177, 185, 262, 270, 278, 286, 519, 527, 535, 543, 551, 559, 567, 575, 583, 591, 599, 607, 615, 623, 645, 653, 662 and 670. In some preferred aspects, CDR1, CDR2 and CDR3 of VH1, VH3, VL1 and VL3 each have at least 90% identity with a corresponding amino acid sequence specified above. As used herein, “at least 90% identity” includes at least 91%, 92%, 93%, 94%, 95%, 96%, 97%, 98%, 99% and 100% identity to the recited reference sequence. In some particularly preferred aspects, CDR1, CDR2 and CDR3 of VH1, VH3, VL1 and VL3 each comprise or consist of a corresponding amino acid sequence specified above.

[0428] In some aspects, VH2 CDR1 and VH4 CDR1 each comprise the same amino acid sequence having at least 80%, at least 85%, at least 90%, at least 91%, at least 92%, at least 93%, at least 94%, at least 95%, at least 96%, at least 97%, at least 98%, at least 99% or 100% identity to any one of SEQ ID NOs:43, 51, 59, 67, 75, 171, 179, 187, 264, 272, 280, 288, 513, 521, 529, 537, 545, 553, 561, 569, 577, 585, 593, 601, 609, 617, 639, 647, 656 and 664. In some aspects, VH2 CDR2 and VH4 CDR2 each comprise the same amino acid sequence having at least 80%, at least 85%, at least 90%, at least 91%, at least 92%, at least 93%, at least 94%, at least 95%, at least 96%, at least 97%, at least 98%, at least 99% or 100% identity to any one of SEQ ID NOs:44, 52, 60, 68, 76, 172, 180, 188, 265, 273, 281, 289, 514, 522, 530, 538, 546, 554, 562, 570, 578, 586, 594, 602, 610, 618, 640, 648, 657 and 665. In some aspects, VH2 CDR3 and VH4 CDR3 each comprise the same amino acid sequence having at least 80%, at least 85%, at least 90%, at least 91%, at least 92%, at least 93%, at least 94%, at least 95%, at least 96%, at least 97%, at least 98%, at least 99% or 100% identity to any one of SEQ ID NOs:45, 53, 61, 69, 77, 173, 181, 189, 266, 274, 282, 290, 515, 523, 531, 539, 547, 555, 563, 571, 579, 587, 595, 603, 611, 619, 641, 649, 658 and 666. In some preferred aspects, CDR1, CDR2 and CDR3 of VH2 and VH4 each have at least 90% identity with a corresponding amino acid sequence specified above. As used herein, “at least 90% identity” includes at least 91%, 92%, 93%, 94%, 95%, 96%, 97%, 98%, 99% and 100% identity to the recited reference sequence. In some particularly preferred aspects, CDR1, CDR2 and CDR3 of VH2 and VH4 each comprise or consist of a corresponding amino acid sequence specified above.

[0429] In some aspects, VH2 CDR1 and VH4 CDR1 each comprise the same amino acid sequence having at least 80%, at least 85%, at least 90%, at least 91%, at least 92%, at least 93%, at least 94%, at least 95%, at least 96%, at least 97%, at least 98%, at least 99% or 100% identity to any one of SEQ ID NOs:43, 51, 59, 67, 75, 171, 179, 187, 264, 272, 280, 288, 513, 521, 529, 537, 545, 553, 561, 569, 577, 585, 593, 601, 609, 617, 639, 647, 656 and 664; VH2 CDR2 and VH4 CDR2 each comprise the same amino acid sequence having at least 80%, at least 85%, at least 90%, at least 91%, at least 92%, at least 93%, at least 94%, at least 95%, at least 96%, at least 97%, at least 98%, at least 99% or 100% identity to any one of SEQ ID NOs:44, 52, 60, 68, 76, 172, 180, 188, 265, 273, 281, 289, 514, 522, 530, 538, 546, 554, 562, 570, 578, 586, 594, 602, 610, 618, 640, 648, 657 and 665; and VH2 CDR3 and VH4 CDR3 each comprise the same amino acid sequence having at least 80%, at least 85%, at least 90%, at least 91%, at least 92%, at least 93%, at least 94%, at least 95%, at least 96%, at least 97%, at least 98%, at least 99% or 100% identity to any one of SEQ ID NOs:45, 53, 61, 69, 77, 173, 181, 189, 266, 274, 282, 290, 515, 523, 531, 539, 547, 555, 563, 571, 579, 587, 595, 603, 611, 619, 641, 649, 658 and 666. In some preferred aspects, CDR1, CDR2 and CDR3 of VH2 and VH4 each have at least 90% identity with a corresponding amino acid sequence specified above. As used herein, “at least 90% identity” includes at least 91%, 92%, 93%, 94%, 95%, 96%, 97%, 98%, 99% and 100% identity to the recited reference sequence. In some particularly preferred aspects, CDR1, CDR2 and CDR3 of VH2 and VH4 each comprise or consist of a corresponding amino acid sequence specified above.

[0430] In some aspects, VL2 CDR1 and VL4 CDR1 each comprise the same amino acid sequence having at least 80%, at least 85%, at least 90%, at least 91%, at least 92%, at least 93%, at least 94%, at least 95%, at least 96%, at least 97%, at least 98%, at least 99% or 100% identity to any one of SEQ ID NOs:39, 47, 55, 63, 71, 167, 175, 183, 260, 268, 276, 284, 517, 525, 533, 541, 549, 557, 565, 573, 581, 589, 597, 605, 613, 621, 643, 651, 660 and 668. In some aspects, VL2 CDR2 and VL4 CDR2 each comprise the same amino acid sequence having at least 80%, at least 85%, at least 90%, at least 91%, at least 92%, at least 93%, at least 94%, at least 95%, at least 96%, at least 97%, at least 98%, at least 99% or 100% identity to any one of SEQ ID NOs:40, 48, 56, 64, 72, 168, 176, 184, 261, 269, 277 (having the sequence of LGS), 285, 518 (having the sequence of DAS), 526 (having the sequence of DVS), 534 (having the sequence of EDS), 542 (having the sequence of KDS), 550 (having the sequence of DAS), 558 (having the sequence of AAS), 566 (having the sequence of GAS), 574 (having the sequence of DDS), 582 (having the sequence of KDS), 590 (having the sequence of SAS), 598 (having the sequence of SAS), 606 (having the sequence of GAS), 614 (having the sequence of GAS), 622 (having the sequence of GAS), 644 (having the sequence of GAS), 652 (having the sequence of SAS), 661 (having the sequence of GAS) and 669 (having the sequence of DAS). In some aspects, VL2 CDR3 and VL4 CDR3 each comprise the same amino acid sequence having at least 80%, at least 85%, at least 90%, at least 91%, at least 92%, at least 93%, at least 94%, at least 95%, at least 96%, at least 97%, at least 98%, at least 99% or 100% identity to any one of SEQ ID NOs:41, 49, 57, 65, 73, 169, 177, 185, 262, 270, 278, 286, 519, 527, 535, 543, 551, 559, 567, 575, 583, 591, 599, 607, 615, 623, 645, 653, 662 and 670. In some preferred aspects, CDR1, CDR2 and CDR3 of VL2 and VL4 each have at least 90% identity with a corresponding amino acid sequence specified above. As used herein, “at least 90% identity” includes at least 91%, 92%, 93%, 94%, 95%, 96%, 97%, 98%, 99% and 100% identity to the recited reference sequence. In some particularly preferred aspects, CDR1, CDR2 and CDR3 of VL2 and VL4 each comprise or consist of a corresponding amino acid sequence specified above.

[0431] In some aspects, VL2 CDR1 and VL4 CDR1 each comprise the same amino acid sequence having at least 80%, at least 85%, at least 90%, at least 91%, at least 92%, at least 93%, at least 94%, at least 95%, at least 96%, at least 97%, at least 98%, at least 99% or 100% identity to any one of SEQ ID NOs:39, 47, 55, 63, 71, 167, 175, 183, 260, 268, 276, 284, 517, 525, 533, 541, 549, 557, 565, 573, 581, 589, 597, 605, 613, 621, 643, 651, 660 and 668; VL2 CDR2 and VL4 CDR2 each comprise the same amino acid sequence having at least 80%, at least 85%, at least 90%, at least 91%, at least 92%, at least 93%, at least 94%, at least 95%, at least 96%, at least 97%, at least 98%, at least 99% or 100% identity to any one of SEQ ID NOs:40, 48, 56, 64, 72, 168, 176, 184, 261, 269, 277 (having the sequence of LGS), 285, 518 (having the sequence of DAS), 526 (having the sequence of DVS), 534 (having the sequence of EDS), 542 (having the sequence of KDS), 550 (having the sequence of DAS), 558 (having the sequence of AAS), 566 (having the sequence of GAS), 574 (having the sequence of DDS), 582 (having the sequence of KDS), 590 (having the sequence of SAS), 598 (having the sequence of SAS), 606 (having the sequence of GAS), 614 (having the sequence of GAS), 622 (having the sequence of GAS), 644 (having the sequence of GAS), 652 (having the sequence of SAS), 661 (having the sequence of GAS) and 669 (having the sequence of DAS); and VL2 CDR3 and VL4 CDR3 each comprise the same amino acid sequence having at least 80%, at least 85%, at least 90%, at least 91%, at least 92%, at least 93%, at least 94%, at least 95%, at least 96%, at least 97%, at least 98%, at least 99% or 100% identity to any one of SEQ ID NOs:41, 49, 57, 65, 73, 169, 177, 185, 262, 270, 278, 286, 519, 527, 535, 543, 551, 559, 567, 575, 583, 591, 599, 607, 615, 623, 645, 653, 662 and 670. In some preferred aspects, CDR1, CDR2 and CDR3 of VL2 and VL4 each have at least 90% identity with a corresponding amino acid sequence specified above. As used herein, “at least 90% identity” includes at least 91%, 92%, 93%, 94%, 95%, 96%, 97%, 98%, 99% and 100% identity to the recited reference sequence. In some particularly preferred aspects, CDR1, CDR2 and CDR3 of VL2 and VL4 each comprise or consist of a corresponding amino acid sequence specified above.

[0432] In some aspects, VH2 CDR1 and VH4 CDR1 each comprise the same amino acid sequence having at least 80%, at least 85%, at least 90%, at least 91%, at least 92%, at least 93%, at least 94%, at least 95%, at least 96%, at least 97%, at least 98%, at least 99% or 100% identity to any one of SEQ ID NOs:43, 51, 59, 67, 75, 171, 179, 187, 264, 272, 280, 288, 513, 521, 529, 537, 545, 553, 561, 569, 577, 585, 593, 601, 609, 617, 639, 647, 656 and 664; VH2 CDR2 and VH4 CDR2 each comprise the same amino acid sequence having at least 80%, at least 85%, at least 90%, at least 91%, at least 92%, at least 93%, at least 94%, at least 95%, at least 96%, at least 97%, at least 98%, at least 99% or 100% identity to any one of SEQ ID NOs:44, 52, 60, 68, 76, 172, 180, 188, 265, 273, 281, 289, 514, 522, 530, 538, 546, 554, 562, 570, 578, 586, 594, 602, 610, 618, 640, 648, 657 and 665; VH2 CDR3 and VH4 CDR3 each comprise the same amino acid sequence having at least 80%, at least 85%, at least 90%, at least 91%, at least 92%, at least 93%, at least 94%, at least 95%, at least 96%, at least 97%, at least 98%, at least 99% or 100% identity to any one of SEQ ID NOs:45, 53, 61, 69, 77, 173, 181, 189, 266, 274, 282, 290, 515, 523, 531, 539, 547, 555, 563, 571, 579, 587, 595, 603, 611, 619, 641, 649, 658 and 666; VL2 CDR1 and VL4 CDR1 each comprise the same amino acid sequence having at least 80%, at least 85%, at least 90%, at least 91%, at least 92%, at least 93%, at least 94%, at least 95%, at least 96%, at least 97%, at least 98%, at least 99% or 100% identity to any one of SEQ ID NOs:39, 47, 55, 63, 71, 167, 175, 183, 260, 268, 276, 284, 517, 525, 533, 541, 549, 557, 565, 573, 581, 589, 597, 605, 613, 621, 643, 651, 660 and 668; VL2 CDR2 and VL4 CDR2 each comprise the same amino acid sequence having at least 80%, at least 85%, at least 90%, at least 91%, at least 92%, at least 93%, at least 94%, at least 95%, at least 96%, at least 97%, at least 98%, at least 99% or 100% identity to any one of SEQ ID NOs:40, 48, 56, 64, 72, 168, 176, 184, 261, 269, 277 (having the sequence of LGS), 285, 518 (having the sequence of DAS), 526 (having the sequence of DVS), 534 (having the sequence of EDS), 542 (having the sequence of KDS), 550 (having the sequence of DAS), 558 (having the sequence of AAS), 566 (having the sequence of GAS), 574 (having the sequence of DDS), 582 (having the sequence of KDS), 590 (having the sequence of SAS), 598 (having the sequence of SAS), 606 (having the sequence of GAS), 614 (having the sequence of GAS), 622 (having the sequence of GAS), 644 (having the sequence of GAS), 652 (having the sequence of SAS), 661 (having the sequence of GAS) and 669 (having the sequence of DAS); and VL2 CDR3 and VL4 CDR3 each comprise the same amino acid sequence having at least 80%, at least 85%, at least 90%, at least 91%, at least 92%, at least 93%, at least 94%, at least 95%, at least 96%, at least 97%, at least 98%, at least 99% or 100% identity to any one of SEQ ID NOs:41, 49, 57, 65, 73, 169, 177, 185, 262, 270, 278, 286, 519, 527, 535, 543, 551, 559, 567, 575, 583, 591, 599, 607, 615, 623, 645, 653, 662 and 670. In some preferred aspects, CDR1, CDR2 and CDR3 of VH2, VH4, VL2 and VL4 each have at least 90% identity with a corresponding amino acid sequence specified above. As used herein, “at least 90% identity” includes at least 91%, 92%, 93%, 94%, 95%, 96%, 97%, 98%, 99% and 100% identity to the recited reference sequence. In some particularly preferred aspects, CDR1, CDR2 and CDR3 of VH2, VH4, VL2 and VL4 each comprise or consist of a corresponding amino acid sequence specified above.

[0433] In some aspects, VH1 CDR1 and VH3 CDR1 each comprise the same amino acid sequence having at least 80%, at least 85%, at least 90%, at least 91%, at least 92%, at least 93%, at least 94%, at least 95%, at least 96%, at least 97%, at least 98%, at least 99% or 100% identity to SEQ ID NO:59; VH1 CDR2 and VH3 CDR2 each comprise the same amino acid sequence having at least 80%, at least 85%, at least 90%, at least 91%, at least 92%, at least 93%, at least 94%, at least 95%, at least 96%, at least 97%, at least 98%, at least 99% or 100% identity to SEQ ID NO:60; VH1 CDR3 and VH3 CDR3 each comprise the same amino acid sequence having at least 80%, at least 85%, at least 90%, at least 91%, at least 92%, at least 93%, at least 94%, at least 95%, at least 96%, at least 97%, at least 98%, at least 99% or 100% identity to SEQ ID NO:61; VL1 CDR1 and VL3 CDR1 each comprise the same amino acid sequence having at least 80%, at least 85%, at least 90%, at least 91%, at least 92%, at least 93%, at least 94%, at least 95%, at least 96%, at least 97%, at least 98%, at least 99% or 100% identity to SEQ ID NO:55; VL1 CDR2 and VL3 CDR2 each comprise the same amino acid sequence having at least 80%, at least 85%, at least 90%, at least 91%, at least 92%, at least 93%, at least 94%, at least 95%, at least 96%, at least 97%, at least 98%, at least 99% or 100% identity to SEQ ID NO:56 (having the sequence of GTN); VL1 CDR3 and VL3 CDR3 each comprise the same amino acid sequence having at least 80%, at least 85%, at least 90%, at least 91%, at least 92%, at least 93%, at least 94%, at least 95%, at least 96%, at least 97%, at least 98%, at least 99% or 100% identity to SEQ ID NO:57; VH2 CDR1 and VH4 CDR1 each comprise the same amino acid sequence having at least 80%, at least 85%, at least 90%, at least 91%, at least 92%, at least 93%, at least 94%, at least 95%, at least 96%, at least 97%, at least 98%, at least 99% or 100% identity to SEQ ID NO:43; VH2 CDR2 and VH4 CDR2 each comprise the same amino acid sequence having at least 80%, at least 85%, at least 90%, at least 91%, at least 92%, at least 93%, at least 94%, at least 95%, at least 96%, at least 97%, at least 98%, at least 99% or 100% identity to SEQ ID NO:44; VH2 CDR3 and VH4 CDR3 each comprise the same amino acid sequence having at least 80%, at least 85%, at least 90%, at least 91%, at least 92%, at least 93%, at least 94%, at least 95%, at least 96%, at least 97%, at least 98%, at least 99% or 100% identity to SEQ ID NO:45; VL2 CDR1 and VL4 CDR1 each comprise the same amino acid sequence having at least 80%, at least 85%, at least 90%, at least 91%, at least 92%, at least 93%, at least 94%, at least 95%, at least 96%, at least 97%, at least 98%, at least 99% or 100% identity to SEQ ID NO:39; VL2 CDR2 and VL4 CDR2 each comprise the same amino acid sequence having at least 80%, at least 85%, at least 90%, at least 91%, at least 92%, at least 93%, at least 94%, at least 95%, at least 96%, at least 97%, at least 98%, at least 99% or 100% identity to SEQ ID NO:40 (having the sequence of GAS); and VL2 CDR3 and VL4 CDR3 each comprise the same amino acid sequence having at least 80%, at least 85%, at least 90%, at least 91%, at least 92%, at least 93%, at least 94%, at least 95%, at least 96%, at least 97%, at least 98%, at least 99% or 100% identity to SEQ ID NO:41. In some preferred aspects, CDR1, CDR2 and CDR3 of VH1, VH2, VH3, VH4, VL1, VL2, VL3 and VL4 each have at least 90% identity with a corresponding amino acid sequence specified above. As used herein, “at least 90% identity” includes at least 91%, 92%, 93%, 94%, 95%, 96%, 97%, 98%, 99% and 100% identity to the recited reference sequence. In some particularly preferred aspects, CDR1, CDR2 and CDR3 of VH1, VH2, VH3, VH4, VL1, VL2, VL3 and VL4 each comprise or consist of a corresponding amino acid sequence specified above.

[0434] In some aspects, VH1 CDR1 and VH3 CDR1 each comprise the same amino acid sequence having at least 80%, at least 85%, at least 90%, at least 91%, at least 92%, at least 93%, at least 94%, at least 95%, at least 96%, at least 97%, at least 98%, at least 99% or 100% identity to SEQ ID NO:43; VH1 CDR2 and VH3 CDR2 each comprise the same amino acid sequence having at least 80%, at least 85%, at least 90%, at least 91%, at least 92%, at least 93%, at least 94%, at least 95%, at least 96%, at least 97%, at least 98%, at least 99% or 100% identity to SEQ ID NO:44; VH1 CDR3 and VH3 CDR3 each comprise the same amino acid sequence having at least 80%, at least 85%, at least 90%, at least 91%, at least 92%, at least 93%, at least 94%, at least 95%, at least 96%, at least 97%, at least 98%, at least 99% or 100% identity to SEQ ID NO:45; VL1 CDR1 and VL3 CDR1 each comprise the same amino acid sequence having at least 80%, at least 85%, at least 90%, at least 91%, at least 92%, at least 93%, at least 94%, at least 95%, at least 96%, at least 97%, at least 98%, at least 99% or 100% identity to SEQ ID NO:39; VL1 CDR2 and VL3 CDR2 each comprise the same amino acid sequence having at least 80%, at least 85%, at least 90%, at least 91%, at least 92%, at least 93%, at least 94%, at least 95%, at least 96%, at least 97%, at least 98%, at least 99% or 100% identity to SEQ ID NO:40 (having the sequence of GAS); VL1 CDR3 and VL3 CDR3 each comprise the same amino acid sequence having at least 80%, at least 85%, at least 90%, at least 91%, at least 92%, at least 93%, at least 94%, at least 95%, at least 96%, at least 97%, at least 98%, at least 99% or 100% identity to SEQ ID NO:41; VH2 CDR1 and VH4 CDR1 each comprise the same amino acid sequence having at least 80%, at least 85%, at least 90%, at least 91%, at least 92%, at least 93%, at least 94%, at least 95%, at least 96%, at least 97%, at least 98%, at least 99% or 100% identity to SEQ ID NO:59; VH2 CDR2 and VH4 CDR2 each comprise the same amino acid sequence having at least 80%, at least 85%, at least 90%, at least 91%, at least 92%, at least 93%, at least 94%, at least 95%, at least 96%, at least 97%, at least 98%, at least 99% or 100% identity to SEQ ID NO:60; VH2 CDR3 and VH4 CDR3 each comprise the same amino acid sequence having at least 80%, at least 85%, at least 90%, at least 91%, at least 92%, at least 93%, at least 94%, at least 95%, at least 96%, at least 97%, at least 98%, at least 99% or 100% identity to SEQ ID NO:61; VL2 CDR1 and VL4 CDR1 each comprise the same amino acid sequence having at least 80%, at least 85%, at least 90%, at least 91%, at least 92%, at least 93%, at least 94%, at least 95%, at least 96%, at least 97%, at least 98%, at least 99% or 100% identity to SEQ ID NO:55; VL2 CDR2 and VL4 CDR2 each comprise the same amino acid sequence having at least 80%, at least 85%, at least 90%, at least 91%, at least 92%, at least 93%, at least 94%, at least 95%, at least 96%, at least 97%, at least 98%, at least 99% or 100% identity to SEQ ID NO:56 (having the sequence of GTN); and VL2 CDR3 and VL4 CDR3 each comprise the same amino acid sequence having at least 80%, at least 85%, at least 90%, at least 91%, at least 92%, at least 93%, at least 94%, at least 95%, at least 96%, at least 97%, at least 98%, at least 99% or 100% identity to SEQ ID NO:57. In some preferred aspects, CDR1, CDR2 and CDR3 of VH1, VH2, VH3, VH4, VL1, VL2, VL3 and VL4 each have at least 90% identity with a corresponding amino acid sequence specified above. As used herein, “at least 90% identity” includes at least 91%, 92%, 93%, 94%, 95%, 96%, 97%, 98%, 99% and 100% identity to the recited reference sequence. In some particularly preferred aspects, CDR1, CDR2 and CDR3 of VH1, VH2, VH3, VH4, VL1, VL2, VL3 and VL4 each comprise or consist of a corresponding amino acid sequence specified above.

[0435] In some aspects, VH1 CDR1 and VH3 CDR1 each comprise the same amino acid sequence having at least 80%, at least 85%, at least 90%, at least 91%, at least 92%, at least 93%, at least 94%, at least 95%, at least 96%, at least 97%, at least 98%, at least 99% or 100% identity to SEQ ID NO:67; VH1 CDR2 and VH3 CDR2 each comprise the same amino acid sequence having at least 80%, at least 85%, at least 90%, at least 91%, at least 92%, at least 93%, at least 94%, at least 95%, at least 96%, at least 97%, at least 98%, at least 99% or 100% identity to SEQ ID NO:68; VH1 CDR3 and VH3 CDR3 each comprise the same amino acid sequence having at least 80%, at least 85%, at least 90%, at least 91%, at least 92%, at least 93%, at least 94%, at least 95%, at least 96%, at least 97%, at least 98%, at least 99% or 100% identity to SEQ ID NO:69; VL1 CDR1 and VL3 CDR1 each comprise the same amino acid sequence having at least 80%, at least 85%, at least 90%, at least 91%, at least 92%, at least 93%, at least 94%, at least 95%, at least 96%, at least 97%, at least 98%, at least 99% or 100% identity to SEQ ID NO:63; VL1 CDR2 and VL3 CDR2 each comprise the same amino acid sequence having at least 80%, at least 85%, at least 90%, at least 91%, at least 92%, at least 93%, at least 94%, at least 95%, at least 96%, at least 97%, at least 98%, at least 99% or 100% identity to SEQ ID NO:64 (having the sequence of DAS); VL1 CDR3 and VL3 CDR3 each comprise the same amino acid sequence having at least 80%, at least 85%, at least 90%, at least 91%, at least 92%, at least 93%, at least 94%, at least 95%, at least 96%, at least 97%, at least 98%, at least 99% or 100% identity to SEQ ID NO:65; VH2 CDR1 and VH4 CDR1 each comprise the same amino acid sequence having at least 80%, at least 85%, at least 90%, at least 91%, at least 92%, at least 93%, at least 94%, at least 95%, at least 96%, at least 97%, at least 98%, at least 99% or 100% identity to SEQ ID NO:43; VH2 CDR2 and VH4 CDR2 each comprise the same amino acid sequence having at least 80%, at least 85%, at least 90%, at least 91%, at least 92%, at least 93%, at least 94%, at least 95%, at least 96%, at least 97%, at least 98%, at least 99% or 100% identity to SEQ ID NO:44; VH2 CDR3 and VH4 CDR3 each comprise the same amino acid sequence having at least 80%, at least 85%, at least 90%, at least 91%, at least 92%, at least 93%, at least 94%, at least 95%, at least 96%, at least 97%, at least 98%, at least 99% or 100% identity to SEQ ID NO:45; VL2 CDR1 and VL4 CDR1 each comprise the same amino acid sequence having at least 80%, at least 85%, at least 90%, at least 91%, at least 92%, at least 93%, at least 94%, at least 95%, at least 96%, at least 97%, at least 98%, at least 99% or 100% identity to SEQ ID NO:39; VL2 CDR2 and VL4 CDR2 each comprise the same amino acid sequence having at least 80%, at least 85%, at least 90%, at least 91%, at least 92%, at least 93%, at least 94%, at least 95%, at least 96%, at least 97%, at least 98%, at least 99% or 100% identity to SEQ ID NO:40 (having the sequence of GAS); and VL2 CDR3 and VL4 CDR3 each comprise the same amino acid sequence having at least 80%, at least 85%, at least 90%, at least 91%, at least 92%, at least 93%, at least 94%, at least 95%, at least 96%, at least 97%, at least 98%, at least 99% or 100% identity to SEQ ID NO:41. In some preferred aspects, CDR1, CDR2 and CDR3 of VH1, VH2, VH3, VH4, VL1, VL2, VL3 and VL4 each have at least 90% identity with a corresponding amino acid sequence specified above. As used herein, “at least 90% identity” includes at least 91%, 92%, 93%, 94%, 95%, 96%, 97%, 98%, 99% and 100% identity to the recited reference sequence. In some particularly preferred aspects, CDR1, CDR2 and CDR3 of VH1, VH2, VH3, VH4, VL1, VL2, VL3 and VL4 each comprise or consist of a corresponding amino acid sequence specified above.

[0436] In some aspects, VH1 CDR1 and VH3 CDR1 each comprise the same amino acid sequence having at least 80%, at least 85%, at least 90%, at least 91%, at least 92%, at least 93%, at least 94%, at least 95%, at least 96%, at least 97%, at least 98%, at least 99% or 100% identity to SEQ ID NO:43; VH1 CDR2 and VH3 CDR2 each comprise the same amino acid sequence having at least 80%, at least 85%, at least 90%, at least 91%, at least 92%, at least 93%, at least 94%, at least 95%, at least 96%, at least 97%, at least 98%, at least 99% or 100% identity to SEQ ID NO:44; VH1 CDR3 and VH3 CDR3 each comprise the same amino acid sequence having at least 80%, at least 85%, at least 90%, at least 91%, at least 92%, at least 93%, at least 94%, at least 95%, at least 96%, at least 97%, at least 98%, at least 99% or 100% identity to SEQ ID NO:45; VL1 CDR1 and VL3 CDR1 each comprise the same amino acid sequence having at least 80%, at least 85%, at least 90%, at least 91%, at least 92%, at least 93%, at least 94%, at least 95%, at least 96%, at least 97%, at least 98%, at least 99% or 100% identity to SEQ ID NO:39; VL1 CDR2 and VL3 CDR2 each comprise the same amino acid sequence having at least 80%, at least 85%, at least 90%, at least 91%, at least 92%, at least 93%, at least 94%, at least 95%, at least 96%, at least 97%, at least 98%, at least 99% or 100% identity to SEQ ID NO:40 (having the sequence of GAS); VL1 CDR3 and VL3 CDR3 each comprise the same amino acid sequence having at least 80%, at least 85%, at least 90%, at least 91%, at least 92%, at least 93%, at least 94%, at least 95%, at least 96%, at least 97%, at least 98%, at least 99% or 100% identity to SEQ ID NO:41; VH2 CDR1 and VH4 CDR1 each comprise the same amino acid sequence having at least 80%, at least 85%, at least 90%, at least 91%, at least 92%, at least 93%, at least 94%, at least 95%, at least 96%, at least 97%, at least 98%, at least 99% or 100% identity to SEQ ID NO:67; VH2 CDR2 and VH4 CDR2 each comprise the same amino acid sequence having at least 80%, at least 85%, at least 90%, at least 91%, at least 92%, at least 93%, at least 94%, at least 95%, at least 96%, at least 97%, at least 98%, at least 99% or 100% identity to SEQ ID NO:68; VH2 CDR3 and VH4 CDR3 each comprise the same amino acid sequence having at least 80%, at least 85%, at least 90%, at least 91%, at least 92%, at least 93%, at least 94%, at least 95%, at least 96%, at least 97%, at least 98%, at least 99% or 100% identity to SEQ ID NO:69; VL2 CDR1 and VL4 CDR1 each comprise the same amino acid sequence having at least 80%, at least 85%, at least 90%, at least 91%, at least 92%, at least 93%, at least 94%, at least 95%, at least 96%, at least 97%, at least 98%, at least 99% or 100% identity to SEQ ID NO:63; VL2 CDR2 and VL4 CDR2 each comprise the same amino acid sequence having at least 80%, at least 85%, at least 90%, at least 91%, at least 92%, at least 93%, at least 94%, at least 95%, at least 96%, at least 97%, at least 98%, at least 99% or 100% identity to SEQ ID NO:64 (having the sequence of DAS); and VL2 CDR3 and VL4 CDR3 each comprise the same amino acid sequence having at least 80%, at least 85%, at least 90%, at least 91%, at least 92%, at least 93%, at least 94%, at least 95%, at least 96%, at least 97%, at least 98%, at least 99% or 100% identity to SEQ ID NO:65. In some preferred aspects, CDR1, CDR2 and CDR3 of VH1, VH2, VH3, VH4, VL1, VL2, VL3 and VL4 each have at least 90% identity with a corresponding amino acid sequence specified above. As used herein, “at least 90% identity” includes at least 91%, 92%, 93%, 94%, 95%, 96%, 97%, 98%, 99% and 100% identity to the recited reference sequence. In some particularly preferred aspects, CDR1, CDR2 and CDR3 of VH1, VH2, VH3, VH4, VL1, VL2, VL3 and VL4 each comprise or consist of a corresponding amino acid sequence specified above.

[0437] In some aspects, VH1 CDR1 and VH3 CDR1 each comprise the same amino acid sequence having at least 80%, at least 85%, at least 90%, at least 91%, at least 92%, at least 93%, at least 94%, at least 95%, at least 96%, at least 97%, at least 98%, at least 99% or 100% identity to SEQ ID NO:51; VH1 CDR2 and VH3 CDR2 each comprise the same amino acid sequence having at least 80%, at least 85%, at least 90%, at least 91%, at least 92%, at least 93%, at least 94%, at least 95%, at least 96%, at least 97%, at least 98%, at least 99% or 100% identity to SEQ ID NO:52; VH1 CDR3 and VH3 CDR3 each comprise the same amino acid sequence having at least 80%, at least 85%, at least 90%, at least 91%, at least 92%, at least 93%, at least 94%, at least 95%, at least 96%, at least 97%, at least 98%, at least 99% or 100% identity to SEQ ID NO:53; VL1 CDR1 and VL3 CDR1 each comprise the same amino acid sequence having at least 80%, at least 85%, at least 90%, at least 91%, at least 92%, at least 93%, at least 94%, at least 95%, at least 96%, at least 97%, at least 98%, at least 99% or 100% identity to SEQ ID NO:47; VL1 CDR2 and VL3 CDR2 each comprise the same amino acid sequence having at least 80%, at least 85%, at least 90%, at least 91%, at least 92%, at least 93%, at least 94%, at least 95%, at least 96%, at least 97%, at least 98%, at least 99% or 100% identity to SEQ ID NO:48 (having the sequence of GAS); VL1 CDR3 and VL3 CDR3 each comprise the same amino acid sequence having at least 80%, at least 85%, at least 90%, at least 91%, at least 92%, at least 93%, at least 94%, at least 95%, at least 96%, at least 97%, at least 98%, at least 99% or 100% identity to SEQ ID NO:49; VH2 CDR1 and VH4 CDR1 each comprise the same amino acid sequence having at least 80%, at least 85%, at least 90%, at least 91%, at least 92%, at least 93%, at least 94%, at least 95%, at least 96%, at least 97%, at least 98%, at least 99% or 100% identity to SEQ ID NO:67; VH2 CDR2 and VH4 CDR2 each comprise the same amino acid sequence having at least 80%, at least 85%, at least 90%, at least 91%, at least 92%, at least 93%, at least 94%, at least 95%, at least 96%, at least 97%, at least 98%, at least 99% or 100% identity to SEQ ID NO:68; VH2 CDR3 and VH4 CDR3 each comprise the same amino acid sequence having at least 80%, at least 85%, at least 90%, at least 91%, at least 92%, at least 93%, at least 94%, at least 95%, at least 96%, at least 97%, at least 98%, at least 99% or 100% identity to SEQ ID NO:69; VL2 CDR1 and VL4 CDR1 each comprise the same amino acid sequence having at least 80%, at least 85%, at least 90%, at least 91%, at least 92%, at least 93%, at least 94%, at least 95%, at least 96%, at least 97%, at least 98%, at least 99% or 100% identity to SEQ ID NO:63; VL2 CDR2 and VL4 CDR2 each comprise the same amino acid sequence having at least 80%, at least 85%, at least 90%, at least 91%, at least 92%, at least 93%, at least 94%, at least 95%, at least 96%, at least 97%, at least 98%, at least 99% or 100% identity to SEQ ID NO:64 (having the sequence of DAS); and VL2 CDR3 and VL4 CDR3 each comprise the same amino acid sequence having at least 80%, at least 85%, at least 90%, at least 91%, at least 92%, at least 93%, at least 94%, at least 95%, at least 96%, at least 97%, at least 98%, at least 99% or 100% identity to SEQ ID NO:65. In some preferred aspects, CDR1, CDR2 and CDR3 of VH1, VH2, VH3, VH4, VL1, VL2, VL3 and VL4 each have at least 90% identity with a corresponding amino acid sequence specified above. As used herein, “at least 90% identity” includes at least 91%, 92%, 93%, 94%, 95%, 96%, 97%, 98%, 99% and 100% identity to the recited reference sequence. In some particularly preferred aspects, CDR1, CDR2 and CDR3 of VH1, VH2, VH3, VH4, VL1, VL2, VL3 and VL4 each comprise or consist of a corresponding amino acid sequence specified above.

[0438] In some aspects, VH1 CDR1 and VH3 CDR1 each comprise the same amino acid sequence having at least 80%, at least 85%, at least 90%, at least 91%, at least 92%, at least 93%, at least 94%, at least 95%, at least 96%, at least 97%, at least 98%, at least 99% or 100% identity to SEQ ID NO:67; VH1 CDR2 and VH3 CDR2 each comprise the same amino acid sequence having at least 80%, at least 85%, at least 90%, at least 91%, at least 92%, at least 93%, at least 94%, at least 95%, at least 96%, at least 97%, at least 98%, at least 99% or 100% identity to SEQ ID NO:68; VH1 CDR3 and VH3 CDR3 each comprise the same amino acid sequence having at least 80%, at least 85%, at least 90%, at least 91%, at least 92%, at least 93%, at least 94%, at least 95%, at least 96%, at least 97%, at least 98%, at least 99% or 100% identity to SEQ ID NO:69; VL1 CDR1 and VL3 CDR1 each comprise the same amino acid sequence having at least 80%, at least 85%, at least 90%, at least 91%, at least 92%, at least 93%, at least 94%, at least 95%, at least 96%, at least 97%, at least 98%, at least 99% or 100% identity to SEQ ID NO:63; VL1 CDR2 and VL3 CDR2 each comprise the same amino acid sequence having at least 80%, at least 85%, at least 90%, at least 91%, at least 92%, at least 93%, at least 94%, at least 95%, at least 96%, at least 97%, at least 98%, at least 99% or 100% identity to SEQ ID NO:64 (having the sequence of DAS); VL1 CDR3 and VL3 CDR3 each comprise the same amino acid sequence having at least 80%, at least 85%, at least 90%, at least 91%, at least 92%, at least 93%, at least 94%, at least 95%, at least 96%, at least 97%, at least 98%, at least 99% or 100% identity to SEQ ID NO:65; VH2 CDR1 and VH4 CDR1 each comprise the same amino acid sequence having at least 80%, at least 85%, at least 90%, at least 91%, at least 92%, at least 93%, at least 94%, at least 95%, at least 96%, at least 97%, at least 98%, at least 99% or 100% identity to SEQ ID NO:51; VH2 CDR2 and VH4 CDR2 each comprise the same amino acid sequence having at least 80%, at least 85%, at least 90%, at least 91%, at least 92%, at least 93%, at least 94%, at least 95%, at least 96%, at least 97%, at least 98%, at least 99% or 100% identity to SEQ ID NO:52; VH2 CDR3 and VH4 CDR3 each comprise the same amino acid sequence having at least 80%, at least 85%, at least 90%, at least 91%, at least 92%, at least 93%, at least 94%, at least 95%, at least 96%, at least 97%, at least 98%, at least 99% or 100% identity to SEQ ID NO:53; VL2 CDR1 and VL4 CDR1 each comprise the same amino acid sequence having at least 80%, at least 85%, at least 90%, at least 91%, at least 92%, at least 93%, at least 94%, at least 95%, at least 96%, at least 97%, at least 98%, at least 99% or 100% identity to SEQ ID NO:47; VL2 CDR2 and VL4 CDR2 each comprise the same amino acid sequence having at least 80%, at least 85%, at least 90%, at least 91%, at least 92%, at least 93%, at least 94%, at least 95%, at least 96%, at least 97%, at least 98%, at least 99% or 100% identity to SEQ ID NO:48 (having the sequence of GAS); and VL2 CDR3 and VL4 CDR3 each comprise the same amino acid sequence having at least 80%, at least 85%, at least 90%, at least 91%, at least 92%, at least 93%, at least 94%, at least 95%, at least 96%, at least 97%, at least 98%, at least 99% or 100% identity to SEQ ID NO:49. In some preferred aspects, CDR1, CDR2 and CDR3 of VH1, VH2, VH3, VH4, VL1, VL2, VL3 and VL4 each have at least 90% identity with a corresponding amino acid sequence specified above. As used herein, “at least 90% identity” includes at least 91%, 92%, 93%, 94%, 95%, 96%, 97%, 98%, 99% and 100% identity to the recited reference sequence. In some particularly preferred aspects, CDR1, CDR2 and CDR3 of VH1, VH2, VH3, VH4, VL1, VL2, VL3 and VL4 each comprise or consist of a corresponding amino acid sequence specified above.

[0439] In some aspects, VH1 CDR1 and VH3 CDR1 each comprise the same amino acid sequence having at least 80%, at least 85%, at least 90%, at least 91%, at least 92%, at least 93%, at least 94%, at least 95%, at least 96%, at least 97%, at least 98%, at least 99% or 100% identity to SEQ ID NO:51; VH1 CDR2 and VH3 CDR2 each comprise the same amino acid sequence having at least 80%, at least 85%, at least 90%, at least 91%, at least 92%, at least 93%, at least 94%, at least 95%, at least 96%, at least 97%, at least 98%, at least 99% or 100% identity to SEQ ID NO:52; VH1 CDR3 and VH3 CDR3 each comprise the same amino acid sequence having at least 80%, at least 85%, at least 90%, at least 91%, at least 92%, at least 93%, at least 94%, at least 95%, at least 96%, at least 97%, at least 98%, at least 99% or 100% identity to SEQ ID NO:53; VL1 CDR1 and VL3 CDR1 each comprise the same amino acid sequence having at least 80%, at least 85%, at least 90%, at least 91%, at least 92%, at least 93%, at least 94%, at least 95%, at least 96%, at least 97%, at least 98%, at least 99% or 100% identity to SEQ ID NO:47; VL1 CDR2 and VL3 CDR2 each comprise the same amino acid sequence having at least 80%, at least 85%, at least 90%, at least 91%, at least 92%, at least 93%, at least 94%, at least 95%, at least 96%, at least 97%, at least 98%, at least 99% or 100% identity to SEQ ID NO:48 (having the sequence of GAS); VL1 CDR3 and VL3 CDR3 each comprise the same amino acid sequence having at least 80%, at least 85%, at least 90%, at least 91%, at least 92%, at least 93%, at least 94%, at least 95%, at least 96%, at least 97%, at least 98%, at least 99% or 100% identity to SEQ ID NO:49; VH2 CDR1 and VH4 CDR1 each comprise the same amino acid sequence having at least 80%, at least 85%, at least 90%, at least 91%, at least 92%, at least 93%, at least 94%, at least 95%, at least 96%, at least 97%, at least 98%, at least 99% or 100% identity to SEQ ID NO:59; VH2 CDR2 and VH4 CDR2 each comprise the same amino acid sequence having at least 80%, at least 85%, at least 90%, at least 91%, at least 92%, at least 93%, at least 94%, at least 95%, at least 96%, at least 97%, at least 98%, at least 99% or 100% identity to SEQ ID NO:60; VH2 CDR3 and VH4 CDR3 each comprise the same amino acid sequence having at least 80%, at least 85%, at least 90%, at least 91%, at least 92%, at least 93%, at least 94%, at least 95%, at least 96%, at least 97%, at least 98%, at least 99% or 100% identity to SEQ ID NO:61; VL2 CDR1 and VL4 CDR1 each comprise the same amino acid sequence having at least 80%, at least 85%, at least 90%, at least 91%, at least 92%, at least 93%, at least 94%, at least 95%, at least 96%, at least 97%, at least 98%, at least 99% or 100% identity to SEQ ID NO:55; VL2 CDR2 and VL4 CDR2 each comprise the same amino acid sequence having at least 80%, at least 85%, at least 90%, at least 91%, at least 92%, at least 93%, at least 94%, at least 95%, at least 96%, at least 97%, at least 98%, at least 99% or 100% identity to SEQ ID NO:56 (having the sequence of GTN); and VL2 CDR3 and VL4 CDR3 each comprise the same amino acid sequence having at least 80%, at least 85%, at least 90%, at least 91%, at least 92%, at least 93%, at least 94%, at least 95%, at least 96%, at least 97%, at least 98%, at least 99% or 100% identity to SEQ ID NO:57. In some preferred aspects, CDR1, CDR2 and CDR3 of VH1, VH2, VH3, VH4, VL1, VL2, VL3 and VL4 each have at least 90% identity with a corresponding amino acid sequence specified above. As used herein, “at least 90% identity” includes at least 91%, 92%, 93%, 94%, 95%, 96%, 97%, 98%, 99% and 100% identity to the recited reference sequence. In some particularly preferred aspects, CDR1, CDR2 and CDR3 of VH1, VH2, VH3, VH4, VL1, VL2, VL3 and VL4 each comprise or consist of a corresponding amino acid sequence specified above.

[0440] In some aspects, VH1 CDR1 and VH3 CDR1 each comprise the same amino acid sequence having at least 80%, at least 85%, at least 90%, at least 91%, at least 92%, at least 93%, at least 94%, at least 95%, at least 96%, at least 97%, at least 98%, at least 99% or 100% identity to SEQ ID NO:59; VH1 CDR2 and VH3 CDR2 each comprise the same amino acid sequence having at least 80%, at least 85%, at least 90%, at least 91%, at least 92%, at least 93%, at least 94%, at least 95%, at least 96%, at least 97%, at least 98%, at least 99% or 100% identity to SEQ ID NO:60; VH1 CDR3 and VH3 CDR3 each comprise the same amino acid sequence having at least 80%, at least 85%, at least 90%, at least 91%, at least 92%, at least 93%, at least 94%, at least 95%, at least 96%, at least 97%, at least 98%, at least 99% or 100% identity to SEQ ID NO:61; VL1 CDR1 and VL3 CDR1 each comprise the same amino acid sequence having at least 80%, at least 85%, at least 90%, at least 91%, at least 92%, at least 93%, at least 94%, at least 95%, at least 96%, at least 97%, at least 98%, at least 99% or 100% identity to SEQ ID NO:55; VL1 CDR2 and VL3 CDR2 each comprise the same amino acid sequence having at least 80%, at least 85%, at least 90%, at least 91%, at least 92%, at least 93%, at least 94%, at least 95%, at least 96%, at least 97%, at least 98%, at least 99% or 100% identity to SEQ ID NO:56 (having the sequence of GTN); VL1 CDR3 and VL3 CDR3 each comprise the same amino acid sequence having at least 80%, at least 85%, at least 90%, at least 91%, at least 92%, at least 93%, at least 94%, at least 95%, at least 96%, at least 97%, at least 98%, at least 99% or 100% identity to SEQ ID NO:57; VH2 CDR1 and VH4 CDR1 each comprise the same amino acid sequence having at least 80%, at least 85%, at least 90%, at least 91%, at least 92%, at least 93%, at least 94%, at least 95%, at least 96%, at least 97%, at least 98%, at least 99% or 100% identity to SEQ ID NO:51; VH2 CDR2 and VH4 CDR2 each comprise the same amino acid sequence having at least 80%, at least 85%, at least 90%, at least 91%, at least 92%, at least 93%, at least 94%, at least 95%, at least 96%, at least 97%, at least 98%, at least 99% or 100% identity to SEQ ID NO:52; VH2 CDR3 and VH4 CDR3 each comprise the same amino acid sequence having at least 80%, at least 85%, at least 90%, at least 91%, at least 92%, at least 93%, at least 94%, at least 95%, at least 96%, at least 97%, at least 98%, at least 99% or 100% identity to SEQ ID NO:53; VL2 CDR1 and VL4 CDR1 each comprise the same amino acid sequence having at least 80%, at least 85%, at least 90%, at least 91%, at least 92%, at least 93%, at least 94%, at least 95%, at least 96%, at least 97%, at least 98%, at least 99% or 100% identity to SEQ ID NO:47; VL2 CDR2 and VL4 CDR2 each comprise the same amino acid sequence having at least 80%, at least 85%, at least 90%, at least 91%, at least 92%, at least 93%, at least 94%, at least 95%, at least 96%, at least 97%, at least 98%, at least 99% or 100% identity to SEQ ID NO:48 (having the sequence of GAS); and VL2 CDR3 and VL4 CDR3 each comprise the same amino acid sequence having at least 80%, at least 85%, at least 90%, at least 91%, at least 92%, at least 93%, at least 94%, at least 95%, at least 96%, at least 97%, at least 98%, at least 99% or 100% identity to SEQ ID NO:49. In some preferred aspects, CDR1, CDR2 and CDR3 of VH1, VH2, VH3, VH4, VL1, VL2, VL3 and VL4 each have at least 90% identity with a corresponding amino acid sequence specified above. As used herein, “at least 90% identity” includes at least 91%, 92%, 93%, 94%, 95%, 96%, 97%, 98%, 99% and 100% identity to the recited reference sequence. In some particularly preferred aspects, CDR1, CDR2 and CDR3 of VH1, VH2, VH3, VH4, VL1, VL2, VL3 and VL4 each comprise or consist of a corresponding amino acid sequence specified above.

[0441] In some aspects, VH1 CDR1 and VH3 CDR1 each comprise the same amino acid sequence having at least 80%, at least 85%, at least 90%, at least 91%, at least 92%, at least 93%, at least 94%, at least 95%, at least 96%, at least 97%, at least 98%, at least 99% or 100% identity to SEQ ID NO:75; VH1 CDR2 and VH3 CDR2 each comprise the same amino acid sequence having at least 80%, at least 85%, at least 90%, at least 91%, at least 92%, at least 93%, at least 94%, at least 95%, at least 96%, at least 97%, at least 98%, at least 99% or 100% identity to SEQ ID NO:76; VH1 CDR3 and VH3 CDR3 each comprise the same amino acid sequence having at least 80%, at least 85%, at least 90%, at least 91%, at least 92%, at least 93%, at least 94%, at least 95%, at least 96%, at least 97%, at least 98%, at least 99% or 100% identity to SEQ ID NO:77; VL1 CDR1 and VL3 CDR1 each comprise the same amino acid sequence having at least 80%, at least 85%, at least 90%, at least 91%, at least 92%, at least 93%, at least 94%, at least 95%, at least 96%, at least 97%, at least 98%, at least 99% or 100% identity to SEQ ID NO:71; VL1 CDR2 and VL3 CDR2 each comprise the same amino acid sequence having at least 80%, at least 85%, at least 90%, at least 91%, at least 92%, at least 93%, at least 94%, at least 95%, at least 96%, at least 97%, at least 98%, at least 99% or 100% identity to SEQ ID NO:72 (having the sequence of SAS); VL1 CDR3 and VL3 CDR3 each comprise the same amino acid sequence having at least 80%, at least 85%, at least 90%, at least 91%, at least 92%, at least 93%, at least 94%, at least 95%, at least 96%, at least 97%, at least 98%, at least 99% or 100% identity to SEQ ID NO:73; VH2 CDR1 and VH4 CDR1 each comprise the same amino acid sequence having at least 80%, at least 85%, at least 90%, at least 91%, at least 92%, at least 93%, at least 94%, at least 95%, at least 96%, at least 97%, at least 98%, at least 99% or 100% identity to SEQ ID NO:67; VH2 CDR2 and VH4 CDR2 each comprise the same amino acid sequence having at least 80%, at least 85%, at least 90%, at least 91%, at least 92%, at least 93%, at least 94%, at least 95%, at least 96%, at least 97%, at least 98%, at least 99% or 100% identity to SEQ ID NO:68; VH2 CDR3 and VH4 CDR3 each comprise the same amino acid sequence having at least 80%, at least 85%, at least 90%, at least 91%, at least 92%, at least 93%, at least 94%, at least 95%, at least 96%, at least 97%, at least 98%, at least 99% or 100% identity to SEQ ID NO:69; VL2 CDR1 and VL4 CDR1 each comprise the same amino acid sequence having at least 80%, at least 85%, at least 90%, at least 91%, at least 92%, at least 93%, at least 94%, at least 95%, at least 96%, at least 97%, at least 98%, at least 99% or 100% identity to SEQ ID NO:63; VL2 CDR2 and VL4 CDR2 each comprise the same amino acid sequence having at least 80%, at least 85%, at least 90%, at least 91%, at least 92%, at least 93%, at least 94%, at least 95%, at least 96%, at least 97%, at least 98%, at least 99% or 100% identity to SEQ ID NO:64 (having the sequence of DAS); and VL2 CDR3 and VL4 CDR3 each comprise the same amino acid sequence having at least 80%, at least 85%, at least 90%, at least 91%, at least 92%, at least 93%, at least 94%, at least 95%, at least 96%, at least 97%, at least 98%, at least 99% or 100% identity to SEQ ID NO:65. In some preferred aspects, CDR1, CDR2 and CDR3 of VH1, VH2, VH3, VH4, VL1, VL2, VL3 and VL4 each have at least 90% identity with a corresponding amino acid sequence specified above. As used herein, “at least 90% identity” includes at least 91%, 92%, 93%, 94%, 95%, 96%, 97%, 98%, 99% and 100% identity to the recited reference sequence. In some particularly preferred aspects, CDR1, CDR2 and CDR3 of VH1, VH2, VH3, VH4, VL1, VL2, VL3 and VL4 each comprise or consist of a corresponding amino acid sequence specified above.

[0442] In some aspects, VH1 CDR1 and VH3 CDR1 each comprise the same amino acid sequence having at least 80%, at least 85%, at least 90%, at least 91%, at least 92%, at least 93%, at least 94%, at least 95%, at least 96%, at least 97%, at least 98%, at least 99% or 100% identity to SEQ ID NO:67; VH1 CDR2 and VH3 CDR2 each comprise the same amino acid sequence having at least 80%, at least 85%, at least 90%, at least 91%, at least 92%, at least 93%, at least 94%, at least 95%, at least 96%, at least 97%, at least 98%, at least 99% or 100% identity to SEQ ID NO:68; VH1 CDR3 and VH3 CDR3 each comprise the same amino acid sequence having at least 80%, at least 85%, at least 90%, at least 91%, at least 92%, at least 93%, at least 94%, at least 95%, at least 96%, at least 97%, at least 98%, at least 99% or 100% identity to SEQ ID NO:69; VL1 CDR1 and VL3 CDR1 each comprise the same amino acid sequence having at least 80%, at least 85%, at least 90%, at least 91%, at least 92%, at least 93%, at least 94%, at least 95%, at least 96%, at least 97%, at least 98%, at least 99% or 100% identity to SEQ ID NO:63; VL1 CDR2 and VL3 CDR2 each comprise the same amino acid sequence having at least 80%, at least 85%, at least 90%, at least 91%, at least 92%, at least 93%, at least 94%, at least 95%, at least 96%, at least 97%, at least 98%, at least 99% or 100% identity to SEQ ID NO:64 (having the sequence of DAS); VL1 CDR3 and VL3 CDR3 each comprise the same amino acid sequence having at least 80%, at least 85%, at least 90%, at least 91%, at least 92%, at least 93%, at least 94%, at least 95%, at least 96%, at least 97%, at least 98%, at least 99% or 100% identity to SEQ ID NO:65; VH2 CDR1 and VH4 CDR1 each comprise the same amino acid sequence having at least 80%, at least 85%, at least 90%, at least 91%, at least 92%, at least 93%, at least 94%, at least 95%, at least 96%, at least 97%, at least 98%, at least 99% or 100% identity to SEQ ID NO:75; VH2 CDR2 and VH4 CDR2 each comprise the same amino acid sequence having at least 80%, at least 85%, at least 90%, at least 91%, at least 92%, at least 93%, at least 94%, at least 95%, at least 96%, at least 97%, at least 98%, at least 99% or 100% identity to SEQ ID NO:76; VH2 CDR3 and VH4 CDR3 each comprise the same amino acid sequence having at least 80%, at least 85%, at least 90%, at least 91%, at least 92%, at least 93%, at least 94%, at least 95%, at least 96%, at least 97%, at least 98%, at least 99% or 100% identity to SEQ ID NO:77; VL2 CDR1 and VL4 CDR1 each comprise the same amino acid sequence having at least 80%, at least 85%, at least 90%, at least 91%, at least 92%, at least 93%, at least 94%, at least 95%, at least 96%, at least 97%, at least 98%, at least 99% or 100% identity to SEQ ID NO:71; VL2 CDR2 and VL4 CDR2 each comprise the same amino acid sequence having at least 80%, at least 85%, at least 90%, at least 91%, at least 92%, at least 93%, at least 94%, at least 95%, at least 96%, at least 97%, at least 98%, at least 99% or 100% identity to SEQ ID NO:72 (having the sequence of SAS); and VL2 CDR3 and VL4 CDR3 each comprise the same amino acid sequence having at least 80%, at least 85%, at least 90%, at least 91%, at least 92%, at least 93%, at least 94%, at least 95%, at least 96%, at least 97%, at least 98%, at least 99% or 100% identity to SEQ ID NO:73. In some preferred aspects, CDR1, CDR2 and CDR3 of VH1, VH2, VH3, VH4, VL1, VL2, VL3 and VL4 each have at least 90% identity with a corresponding amino acid sequence specified above. As used herein, “at least 90% identity” includes at least 91%, 92%, 93%, 94%, 95%, 96%, 97%, 98%, 99% and 100% identity to the recited reference sequence. In some particularly preferred aspects, CDR1, CDR2 and CDR3 of VH1, VH2, VH3, VH4, VL1, VL2, VL3 and VL4 each comprise or consist of a corresponding amino acid sequence specified above.

[0443] In some aspects, VH1 comprises the same heavy chain variable region as VH3 (e.g., an amino acid sequence having at least 80%, at least 85%, at least 90%, at least 91%, at least 92%, at least 93%, at least 94%, at least 95%, at least 96%, at least 97%, at least 98%, at least 99% or 100% identity to any one of SEQ ID NOs:42, 50, 58, 66, 74, 170, 178, 186, 263, 271, 279, 287, 510, 512, 520, 528, 536, 544, 552, 560, 568, 576, 584, 592, 600, 608, 616, 624, 626, 628, 630, 632, 634, 636, 638, 646, 654, 663, 779, 781, 785 and 787). In some aspects, VL1 comprises the same light chain variable region as VL3 (e.g., an amino acid sequence having at least 80%, at least 85%, at least 90%, at least 91%, at least 92%, at least 93%, at least 94%, at least 95%, at least 96%, at least 97%, at least 98%, at least 99% or 100% identity to any one of SEQ ID NOs:38, 46, 54, 62, 70, 166, 174, 182, 259, 267, 275, 283, 508, 509, 511, 516, 524, 532, 540, 548, 556, 564, 572, 580, 588, 596, 604, 612, 620, 625, 627, 629, 631, 633, 635, 637, 642, 650, 659 and 667). In some aspects, VH1 comprises the same heavy chain variable region as VH3 (e.g., an amino acid sequence having at least 80%, at least 85%, at least 90%, at least 91%, at least 92%, at least 93%, at least 94%, at least 95%, at least 96%, at least 97%, at least 98%, at least 99% or 100% identity to any one of SEQ ID NOs:42, 50, 58, 66, 74, 170, 178, 186, 263, 271, 279, 287, 510, 512, 520, 528, 536, 544, 552, 560, 568, 576, 584, 592, 600, 608, 616, 624, 626, 628, 630, 632, 634, 636, 638, 646, 654, 663, 779, 781, 785 and 787), and VL1 comprises the same light chain variable region as VL3 (e.g., an amino acid sequence having at least 80%, at least 85%, at least 90%, at least 91%, at least 92%, at least 93%, at least 94%, at least 95%, at least 96%, at least 97%, at least 98%, at least 99% or 100% identity to any one of SEQ ID NOs:38, 46, 54, 62, 70, 166, 174, 182, 259, 267, 275, 283, 508, 509, 511, 516, 524, 532, 540, 548, 556, 564, 572, 580, 588, 596, 604, 612, 620, 625, 627, 629, 631, 633, 635, 637, 642, 650, 659 and 667). In some aspects, the sequence has a mutation at N62, for example, N62Q or N62Q at, for example, SEQ ID NO:279. In some preferred aspects, VH1, VH3, VL1 and VL3 each have at least 90% identity with a corresponding amino acid sequence specified above, optionally with a mutation at N62 as described above. As used herein, “at least 90% identity” includes at least 91%, 92%, 93%, 94%, 95%, 96%, 97%, 98%, 99% and 100% identity to the recited reference sequence. In some particularly preferred aspects, VH1, VH3, VL1 and VL3 each comprise or consist of a corresponding amino acid sequence specified above, optionally with a mutation at N62 as described above.

[0444] In some aspects, VH2 comprises the same heavy chain variable region as VH4 (e.g., an amino acid sequence having at least 80%, at least 85%, at least 90%, at least 91%, at least 92%, at least 93%, at least 94%, at least 95%, at least 96%, at least 97%, at least 98%, at least 99% or 100% identity to any one of SEQ ID NOs:42, 50, 58, 66, 74, 170, 178, 186, 263, 271, 279, 287, 510, 512, 520, 528, 536, 544, 552, 560, 568, 576, 584, 592, 600, 608, 616, 624, 626, 628, 630, 632, 634, 636, 638, 646, 654, 663, 779, 781, 785 and 787). In some aspects, VL2 comprises the same light chain variable region as VL4 (e.g., an amino acid sequence having at least 80%, at least 85%, at least 90%, at least 91%, at least 92%, at least 93%, at least 94%, at least 95%, at least 96%, at least 97%, at least 98%, at least 99% or 100% identity to any one of SEQ ID NOs:38, 46, 54, 62, 70, 166, 174, 182, 259, 267, 275, 283, 508, 509, 511, 516, 524, 532, 540, 548, 556, 564, 572, 580, 588, 596, 604, 612, 620, 625, 627, 629, 631, 633, 635, 637, 642, 650, 659 and 667). In some aspects, VH2 comprises the same heavy chain variable region as VH4 (e.g., an amino acid sequence having at least 80%, at least 85%, at least 90%, at least 91%, at least 92%, at least 93%, at least 94%, at least 95%, at least 96%, at least 97%, at least 98%, at least 99% or 100% identity to any one of SEQ ID NOs:42, 50, 58, 66, 74, 170, 178, 186, 263, 271, 279, 287, 510, 512, 520, 528, 536, 544, 552, 560, 568, 576, 584, 592, 600, 608, 616, 624, 626, 628, 630, 632, 634, 636, 638, 646, 654, 663, 779, 781, 785 and 787), and VL2 comprises the same light chain variable region as VL4 (e.g., an amino acid sequence having at least 80%, at least 85%, at least 90%, at least 91%, at least 92%, at least 93%, at least 94%, at least 95%, at least 96%, at least 97%, at least 98%, at least 99% or 100% identity to any one of SEQ ID NOs:38, 46, 54, 62, 70, 166, 174, 182, 259, 267, 275, 283, 508, 509, 511, 516, 524, 532, 540, 548, 556, 564, 572, 580, 588, 596, 604, 612, 620, 625, 627, 629, 631, 633, 635, 637, 642, 650, 659 and 667). In some aspects, the sequence has a mutation at N62, for example, N62Q or N62Q at, for example, SEQ ID NO:279. In some preferred aspects, VH2, VH4, VL2 and VL4 each have at least 90% identity with a corresponding amino acid sequence specified above, optionally with a mutation at N62 as described above. As used herein, “at least 90% identity” includes at least 91%, 92%, 93%, 94%, 95%, 96%, 97%, 98%, 99% and 100% identity to the recited reference sequence. In some particularly preferred aspects, VH2, VH4, VL2 and VL4 each comprise or consist of a corresponding amino acid sequence specified above, optionally with a mutation at N62 as described above.

[0445] In some aspects, VH1 comprises the same heavy chain variable region as VH3 (e.g., an amino acid sequence having at least 80%, at least 85%, at least 90%, at least 91%, at least 92%, at least 93%, at least 94%, at least 95%, at least 96%, at least 97%, at least 98%, at least 99% or 100% identity to any one of SEQ ID NOs:42, 50, 58, 66, 74, 170, 178, 186, 263, 271, 279, 287, 510, 512, 520, 528, 536, 544, 552, 560, 568, 576, 584, 592, 600, 608, 616, 624, 626, 628, 630, 632, 634, 636, 638, 646, 654, 663, 779, 781, 785 and 787); VL1 comprises the same light chain variable region as VL3 (e.g., an amino acid sequence having at least 80%, at least 85%, at least 90%, at least 91%, at least 92%, at least 93%, at least 94%, at least 95%, at least 96%, at least 97%, at least 98%, at least 99% or 100% identity to any one of SEQ ID NOs:38, 46, 54, 62, 70, 166, 174, 182, 259, 267, 275, 283, 508, 509, 511, 516, 524, 532, 540, 548, 556, 564, 572, 580, 588, 596, 604, 612, 620, 625, 627, 629, 631, 633, 635, 637, 642, 650, 659 and 667); VH2 comprises the same heavy chain variable region as VH4 (e.g., an amino acid sequence having at least 80%, at least 85%, at least 90%, at least 91%, at least 92%, at least 93%, at least 94%, at least 95%, at least 96%, at least 97%, at least 98%, at least 99% or 100% identity to any one of SEQ ID NOs:42, 50, 58, 66, 74, 170, 178, 186, 263, 271, 279, 287, 510, 512, 520, 528, 536, 544, 552, 560, 568, 576, 584, 592, 600, 608, 616, 624, 626, 628, 630, 632, 634, 636, 638, 646, 654, 663, 779, 781, 785 and 787); and VL2 comprises the same light chain variable region as VL4 (e.g., an amino acid sequence having at least 80%, at least 85%, at least 90%, at least 91%, at least 92%, at least 93%, at least 94%, at least 95%, at least 96%, at least 97%, at least 98%, at least 99% or 100% identity to any one of SEQ ID NOs:38, 46, 54, 62, 70, 166, 174, 182, 259, 267, 275, 283, 508, 509, 511, 516, 524, 532, 540, 548, 556, 564, 572, 580, 588, 596, 604, 612, 620, 625, 627, 629, 631, 633, 635, 637, 642, 650, 659 and 667). In some aspects, the sequence has a mutation at N62, for example, N62Q or N62Q at, for example, SEQ ID NO:279. In some preferred aspects, VH1, VH2, VH3, VH4, VL1, VL2, VL3 and VL4 each have at least 90% identity with a corresponding amino acid sequence specified above, optionally with a mutation at N62 as described above. As used herein, “at least 90% identity” includes at least 91%, 92%, 93%, 94%, 95%, 96%, 97%, 98%, 99% and 100% identity to the recited reference sequence. In some particularly preferred aspects, VH1, VH2, VH3, VH4, VL1, VL2, VL3 and VL4 each comprise or consist of a corresponding amino acid sequence specified above, optionally with a mutation at N62 as described above.

[0446] In some aspects, VH1 and VH3 each comprise the same amino acid sequence having at least 80%, at least 85%, at least 90%, at least 91%, at least 92%, at least 93%, at least 94%, at least 95%, at least 96%, at least 97%, at least 98%, at least 99% or 100% identity to SEQ ID NO:58; VL1 and VL3 each comprise the same amino acid sequence having at least 80%, at least 85%, at least 90%, at least 91%, at least 92%, at least 93%, at least 94%, at least 95%, at least 96%, at least 97%, at least 98%, at least 99% or 100% identity to SEQ ID NO:54; VH2 and VH4 each comprise the same amino acid sequence having at least 80%, at least 85%, at least 90%, at least 91%, at least 92%, at least 93%, at least 94%, at least 95%, at least 96%, at least 97%, at least 98%, at least 99% or 100% identity to SEQ ID NO:42; and VL2 and VL4 each comprise the same amino acid sequence having at least 80%, at least 85%, at least 90%, at least 91%, at least 92%, at least 93%, at least 94%, at least 95%, at least 96%, at least 97%, at least 98%, at least 99% or 100% identity to SEQ ID NO:38. In some preferred aspects, VH1, VH2, VH3, VH4, VL1, VL2, VL3 and VL4 each have at least 90% identity with a corresponding amino acid sequence specified above. As used herein, “at least 90% identity” includes at least 91%, 92%, 93%, 94%, 95%, 96%, 97%, 98%, 99% and 100% identity to the recited reference sequence. In some particularly preferred aspects, VH1, VH2, VH3, VH4, VL1, VL2, VL3 and VL4 each comprise or consist of a corresponding amino acid sequence specified above.

[0447] In some aspects, VH1 and VH3 each comprise the same amino acid sequence having at least 80%, at least 85%, at least 90%, at least 91%, at least 92%, at least 93%, at least 94%, at least 95%, at least 96%, at least 97%, at least 98%, at least 99% or 100% identity to SEQ ID NO:42; VL1 and VL3 each comprise the same amino acid sequence having at least 80%, at least 85%, at least 90%, at least 91%, at least 92%, at least 93%, at least 94%, at least 95%, at least 96%, at least 97%, at least 98%, at least 99% or 100% identity to SEQ ID NO:38; VH2 and VH4 each comprise the same amino acid sequence having at least 80%, at least 85%, at least 90%, at least 91%, at least 92%, at least 93%, at least 94%, at least 95%, at least 96%, at least 97%, at least 98%, at least 99% or 100% identity to SEQ ID NO:58; and VL2 and VL4 each comprise the same amino acid sequence having at least 80%, at least 85%, at least 90%, at least 91%, at least 92%, at least 93%, at least 94%, at least 95%, at least 96%, at least 97%, at least 98%, at least 99% or 100% identity to SEQ ID NO:54. In some preferred aspects, VH1, VH2, VH3, VH4, VL1, VL2, VL3 and VL4 each have at least 90% identity with a corresponding amino acid sequence specified above. As used herein, “at least 90% identity” includes at least 91%, 92%, 93%, 94%, 95%, 96%, 97%, 98%, 99% and 100% identity to the recited reference sequence. In some particularly preferred aspects, VH1, VH2, VH3, VH4, VL1, VL2, VL3 and VL4 each comprise or consist of a corresponding amino acid sequence specified above.

[0448] In some aspects, VH1 and VH3 each comprise the same amino acid sequence having at least 80%, at least 85%, at least 90%, at least 91%, at least 92%, at least 93%, at least 94%, at least 95%, at least 96%, at least 97%, at least 98%, at least 99% or 100% identity to SEQ ID NO:66; VL1 and VL3 each comprise the same amino acid sequence having at least 80%, at least 85%, at least 90%, at least 91%, at least 92%, at least 93%, at least 94%, at least 95%, at least 96%, at least 97%, at least 98%, at least 99% or 100% identity to SEQ ID NO:62; VH2 and VH4 each comprise the same amino acid sequence having at least 80%, at least 85%, at least 90%, at least 91%, at least 92%, at least 93%, at least 94%, at least 95%, at least 96%, at least 97%, at least 98%, at least 99% or 100% identity to SEQ ID NO:42; and VL2 and VL4 each comprise the same amino acid sequence having at least 80%, at least 85%, at least 90%, at least 91%, at least 92%, at least 93%, at least 94%, at least 95%, at least 96%, at least 97%, at least 98%, at least 99% or 100% identity to SEQ ID NO:38. In some preferred aspects, VH1, VH2, VH3, VH4, VL1, VL2, VL3 and VL4 each have at least 90% identity with a corresponding amino acid sequence specified above. As used herein, “at least 90% identity” includes at least 91%, 92%, 93%, 94%, 95%, 96%, 97%, 98%, 99% and 100% identity to the recited reference sequence. In some particularly preferred aspects, VH1, VH2, VH3, VH4, VL1, VL2, VL3 and VL4 each comprise or consist of a corresponding amino acid sequence specified above.

[0449] In some aspects, VH1 and VH3 each comprise the same amino acid sequence having at least 80%, at least 85%, at least 90%, at least 91%, at least 92%, at least 93%, at least 94%, at least 95%, at least 96%, at least 97%, at least 98%, at least 99% or 100% identity to SEQ ID NO:42; VL1 and VL3 each comprise the same amino acid sequence having at least 80%, at least 85%, at least 90%, at least 91%, at least 92%, at least 93%, at least 94%, at least 95%, at least 96%, at least 97%, at least 98%, at least 99% or 100% identity to SEQ ID NO:38; VH2 and VH4 each comprise the same amino acid sequence having at least 80%, at least 85%, at least 90%, at least 91%, at least 92%, at least 93%, at least 94%, at least 95%, at least 96%, at least 97%, at least 98%, at least 99% or 100% identity to SEQ ID NO:66; and VL2 and VL4 each comprise the same amino acid sequence having at least 80%, at least 85%, at least 90%, at least 91%, at least 92%, at least 93%, at least 94%, at least 95%, at least 96%, at least 97%, at least 98%, at least 99% or 100% identity to SEQ ID NO:62. In some preferred aspects, VH1, VH2, VH3, VH4, VL1, VL2, VL3 and VL4 each have at least 90% identity with a corresponding amino acid sequence specified above. As used herein, “at least 90% identity” includes at least 91%, 92%, 93%, 94%, 95%, 96%, 97%, 98%, 99% and 100% identity to the recited reference sequence. In some particularly preferred aspects, VH1, VH2, VH3, VH4, VL1, VL2, VL3 and VL4 each comprise or consist of a corresponding amino acid sequence specified above.

[0450] In some aspects, VH1 and VH3 each comprise the same amino acid sequence having at least 80%, at least 85%, at least 90%, at least 91%, at least 92%, at least 93%, at least 94%, at least 95%, at least 96%, at least 97%, at least 98%, at least 99% or 100% identity to SEQ ID NO:50; VL1 and VL3 each comprise the same amino acid sequence having at least 80%, at least 85%, at least 90%, at least 91%, at least 92%, at least 93%, at least 94%, at least 95%, at least 96%, at least 97%, at least 98%, at least 99% or 100% identity to SEQ ID NO:46; VH2 and VH4 each comprise the same amino acid sequence having at least 80%, at least 85%, at least 90%, at least 91%, at least 92%, at least 93%, at least 94%, at least 95%, at least 96%, at least 97%, at least 98%, at least 99% or 100% identity to SEQ ID NO:66; and VL2 and VL4 each comprise the same amino acid sequence having at least 80%, at least 85%, at least 90%, at least 91%, at least 92%, at least 93%, at least 94%, at least 95%, at least 96%, at least 97%, at least 98%, at least 99% or 100% identity to SEQ ID NO:62. In some preferred aspects, VH1, VH2, VH3, VH4, VL1, VL2, VL3 and VL4 each have at least 90% identity with a corresponding amino acid sequence specified above. As used herein, “at least 90% identity” includes at least 91%, 92%, 93%, 94%, 95%, 96%, 97%, 98%, 99% and 100% identity to the recited reference sequence. In some particularly preferred aspects, VH1, VH2, VH3, VH4, VL1, VL2, VL3 and VL4 each comprise or consist of a corresponding amino acid sequence specified above.

[0451] In some aspects, VH1 and VH3 each comprise the same amino acid sequence having at least 80%, at least 85%, at least 90%, at least 91%, at least 92%, at least 93%, at least 94%, at least 95%, at least 96%, at least 97%, at least 98%, at least 99% or 100% identity to SEQ ID NO:66; VL1 and VL3 each comprise the same amino acid sequence having at least 80%, at least 85%, at least 90%, at least 91%, at least 92%, at least 93%, at least 94%, at least 95%, at least 96%, at least 97%, at least 98%, at least 99% or 100% identity to SEQ ID NO:62; VH2 and VH4 each comprise the same amino acid sequence having at least 80%, at least 85%, at least 90%, at least 91%, at least 92%, at least 93%, at least 94%, at least 95%, at least 96%, at least 97%, at least 98%, at least 99% or 100% identity to SEQ ID NO:50; and VL2 and VL4 each comprise the same amino acid sequence having at least 80%, at least 85%, at least 90%, at least 91%, at least 92%, at least 93%, at least 94%, at least 95%, at least 96%, at least 97%, at least 98%, at least 99% or 100% identity to SEQ ID NO:46. In some preferred aspects, VH1, VH2, VH3, VH4, VL1, VL2, VL3 and VL4 each have at least 90% identity with a corresponding amino acid sequence specified above. As used herein, “at least 90% identity” includes at least 91%, 92%, 93%, 94%, 95%, 96%, 97%, 98%, 99% and 100% identity to the recited reference sequence. In some particularly preferred aspects, VH1, VH2, VH3, VH4, VL1, VL2, VL3 and VL4 each comprise or consist of a corresponding amino acid sequence specified above.

[0452] In some aspects, VH1 and VH3 each comprise the same amino acid sequence having at least 80%, at least 85%, at least 90%, at least 91%, at least 92%, at least 93%, at least 94%, at least 95%, at least 96%, at least 97%, at least 98%, at least 99% or 100% identity to SEQ ID NO:50; VL1 and VL3 each comprise the same amino acid sequence having at least 80%, at least 85%, at least 90%, at least 91%, at least 92%, at least 93%, at least 94%, at least 95%, at least 96%, at least 97%, at least 98%, at least 99% or 100% identity to SEQ ID NO:46; VH2 and VH4 each comprise the same amino acid sequence having at least 80%, at least 85%, at least 90%, at least 91%, at least 92%, at least 93%, at least 94%, at least 95%, at least 96%, at least 97%, at least 98%, at least 99% or 100% identity to SEQ ID NO:58; and VL2 and VL4 each comprise the same amino acid sequence having at least 80%, at least 85%, at least 90%, at least 91%, at least 92%, at least 93%, at least 94%, at least 95%, at least 96%, at least 97%, at least 98%, at least 99% or 100% identity to SEQ ID NO:54. In some preferred aspects, VH1, VH2, VH3, VH4, VL1, VL2, VL3 and VL4 each have at least 90% identity with a corresponding amino acid sequence specified above. As used herein, “at least 90% identity” includes at least 91%, 92%, 93%, 94%, 95%, 96%, 97%, 98%, 99% and 100% identity to the recited reference sequence. In some particularly preferred aspects, VH1, VH2, VH3, VH4, VL1, VL2, VL3 and VL4 each comprise or consist of a corresponding amino acid sequence specified above.

[0453] In some aspects, VH1 and VH3 each comprise the same amino acid sequence having at least 80%, at least 85%, at least 90%, at least 91%, at least 92%, at least 93%, at least 94%, at least 95%, at least 96%, at least 97%, at least 98%, at least 99% or 100% identity to SEQ ID NO:58; VL1 and VL3 each comprise the same amino acid sequence having at least 80%, at least 85%, at least 90%, at least 91%, at least 92%, at least 93%, at least 94%, at least 95%, at least 96%, at least 97%, at least 98%, at least 99% or 100% identity to SEQ ID NO:54; VH2 and VH4 each comprise the same amino acid sequence having at least 80%, at least 85%, at least 90%, at least 91%, at least 92%, at least 93%, at least 94%, at least 95%, at least 96%, at least 97%, at least 98%, at least 99% or 100% identity to SEQ ID NO:50; and VL2 and VL4 each comprise the same amino acid sequence having at least 80%, at least 85%, at least 90%, at least 91%, at least 92%, at least 93%, at least 94%, at least 95%, at least 96%, at least 97%, at least 98%, at least 99% or 100% identity to SEQ ID NO:46. In some preferred aspects, VH1, VH2, VH3, VH4, VL1, VL2, VL3 and VL4 each have at least 90% identity with a corresponding amino acid sequence specified above. As used herein, “at least 90% identity” includes at least 91%, 92%, 93%, 94%, 95%, 96%, 97%, 98%, 99% and 100% identity to the recited reference sequence. In some particularly preferred aspects, VH1, VH2, VH3, VH4, VL1, VL2, VL3 and VL4 each comprise or consist of a corresponding amino acid sequence specified above.

[0454] In some aspects, two of VH1, VH2, VH3 and VH4 comprise the same CDR1, CDR2 and CDR3 regions (e.g., a CDR1 comprising an amino acid sequence having at least 80%, at least 85%, at least 90%, at least 91%, at least 92%, at least 93%, at least 94%, at least 95%, at least 96%, at least 97%, at least 98%, at least 99% or 100% identity to any one of SEQ ID NOs:43, 51, 59, 67, 75, 171, 179, 187, 264, 272, 280, 288, 513, 521, 529, 537, 545, 553, 561, 569, 577, 585, 593, 601, 609, 617, 639, 647, 656 and 664; a CDR2 comprising an amino acid sequence having at least 80%, at least 85%, at least 90%, at least 91%, at least 92%, at least 93%, at least 94%, at least 95%, at least 96%, at least 97%, at least 98%, at least 99% or 100% identity to any one of SEQ ID NOs:44, 52, 60, 68, 76, 172, 180, 188, 265, 273, 281, 289, 514, 522, 530, 538, 546, 554, 562, 570, 578, 586, 594, 602, 610, 618, 640, 648, 657 and 665; and a CDR3 comprising an amino acid sequence having at least 80%, at least 85%, at least 90%, at least 91%, at least 92%, at least 93%, at least 94%, at least 95%, at least 96%, at least 97%, at least 98%, at least 99% or 100% identity to any one of SEQ ID NOs:45, 53, 61, 69, 77, 173, 181, 189, 266, 274, 282, 290, 515, 523, 531, 539, 547, 555, 563, 571, 579, 587, 595, 603, 611, 619, 641, 649, 658 and 666). In some preferred aspects, CDR1, CDR2 and CDR3 of each of VH1, VH2, VH3 and VH4 have at least 90% identity with the corresponding amino acid sequences specified above. As used herein, “at least 90% identity” includes at least 91%, 92%, 93%, 94%, 95%, 96%, 97%, 98%, 99% and 100% identity to the recited reference sequence. In some particularly preferred aspects, CDR1, CDR2 and CDR3 of each of VH1, VH2, VH3 and VH4 comprise or consist of the corresponding amino acid sequences specified above.

[0455] In some aspects, two of VL1, VL2, VL3 and VL4 comprise the same CDR1, CDR2 and CDR3 regions (e.g., a CDR1 comprising an amino acid sequence having at least 80%, at least 85%, at least 90%, at least 91%, at least 92%, at least 93%, at least 94%, at least 95%, at least 96%, at least 97%, at least 98%, at least 99% or 100% identity to any one of SEQ ID NOs:39, 47, 55, 63, 71, 167, 175, 183, 260, 268, 276, 284, 589, 597, 605, 613, 621, 643, 651, 660 and 668; a CDR2 comprising an amino acid sequence having at least 80%, at least 85%, at least 90%, at least 91%, at least 92%, at least 93%, at least 94%, at least 95%, at least 96%, at least 97%, at least 98%, at least 99% or 100% identity to any one of SEQ ID NOs:40, 48, 56, 64, 72, 168, 176, 184, 261, 269, 277 (having the sequence of LGS), 285, 518 (having the sequence of DAS), 526 (having the sequence of DVS), 534 (having the sequence of EDS), 542 (having the sequence of KDS), 550 (having the sequence of DAS), 558 (having the sequence of AAS), 566 (having the sequence of GAS), 574 (having the sequence of DDS), 582 (having the sequence of KDS), 590 (having the sequence of SAS), 598 (having the sequence of SAS), 606 (having the sequence of GAS), 614 (having the sequence of GAS), 622 (having the sequence of GAS), 644 (having the sequence of GAS), 652 (having the sequence of SAS), 661 (having the sequence of GAS) and 669 (having the sequence of DAS); and a CDR3 comprising an amino acid sequence having at least 80%, at least 85%, at least 90%, at least 91%, at least 92%, at least 93%, at least 94%, at least 95%, at least 96%, at least 97%, at least 98%, at least 99% or 100% identity to any one of SEQ ID NOs:41, 49, 57, 65, 73, 169, 177, 185, 262, 270, 278, 286, 519, 527, 535, 543, 551, 559, 567, 575, 583, 591, 599, 607, 615, 623, 645, 653, 662 and 670). In some preferred aspects, CDR1, CDR2 and CDR3 of each of VL1, VL2, VL3 and VL4 have at least 90% identity with the corresponding amino acid sequences specified above. As used herein, “at least 90% identity” includes at least 91%, 92%, 93%, 94%, 95%, 96%, 97%, 98%, 99% and 100% identity to the recited reference sequence. In some particularly preferred aspects, CDR1, CDR2 and CDR3 of each of VL1, VL2, VL3 and VL4 comprise or consist of the corresponding amino acid sequences specified above.

[0456] In some aspects, two of VH1, VH2, VH3 and VH4 comprise the same CDR1, CDR2 and CDR3 regions (e.g., a CDR1 comprising an amino acid sequence having at least 80%, at least 85%, at least 90%, at least 91%, at least 92%, at least 93%, at least 94%, at least 95%, at least 96%, at least 97%, at least 98%, at least 99% or 100% identity to any one of SEQ ID NOs:43, 51, 59, 67, 75, 171, 179, 187, 264, 272, 280, 288, 513, 521, 529, 537, 545, 553, 561, 569, 577, 585, 593, 601, 609, 617, 639, 647, 656 and 664; a CDR2 comprising an amino acid sequence having at least 80%, at least 85%, at least 90%, at least 91%, at least 92%, at least 93%, at least 94%, at least 95%, at least 96%, at least 97%, at least 98%, at least 99% or 100% identity to any one of SEQ ID NOs:44, 52, 60, 68, 76, 172, 180, 188, 265, 273, 281, 289, 514, 522, 530, 538, 546, 554, 562, 570, 578, 586, 594, 602, 610, 618, 640, 648, 657 and 665; and a CDR3 comprising an amino acid sequence having at least 80%, at least 85%, at least 90%, at least 91%, at least 92%, at least 93%, at least 94%, at least 95%, at least 96%, at least 97%, at least 98%, at least 99% or 100% identity to any one of SEQ ID NOs:45, 53, 61, 69, 77, 173, 181, 189, 266, 274, 282, 290, 515, 523, 531, 539, 547, 555, 563, 571, 579, 587, 595, 603, 611, 619, 641, 649, 658 and 666); and two of VL1, VL2, VL3 and VL4 comprise the same CDR1, CDR2 and CDR3 regions (e.g., a CDR1 comprising an amino acid sequence having at least 80%, at least 85%, at least 90%, at least 91%, at least 92%, at least 93%, at least 94%, at least 95%, at least 96%, at least 97%, at least 98%, at least 99% or 100% identity to any one of SEQ ID NOs:39, 47, 55, 63, 71, 167, 175, 183, 260, 268, 276, 284, 517, 525, 533, 541, 549, 557, 565, 573, 581, 589, 597, 605, 613, 621, 643, 651, 660 and 668; a CDR2 comprising an amino acid sequence having at least 80%, at least 85%, at least 90%, at least 91%, at least 92%, at least 93%, at least 94%, at least 95%, at least 96%, at least 97%, at least 98%, at least 99% or 100% identity to any one of SEQ ID NOs:40, 48, 56, 64, 72, 168, 176, 184, 261, 269, 277 (having the sequence of LGS), 285, 518 (having the sequence of DAS), 526 (having the sequence of DVS), 534 (having the sequence of EDS), 542 (having the sequence of KDS), 550 (having the sequence of DAS), 558 (having the sequence of AAS), 566 (having the sequence of GAS), 574 (having the sequence of DDS), 582 (having the sequence of KDS), 590 (having the sequence of SAS), 598 (having the sequence of SAS), 606 (having the sequence of GAS), 614 (having the sequence of GAS), 622 (having the sequence of GAS), 644 (having the sequence of GAS), 652 (having the sequence of SAS), 661 (having the sequence of GAS) and 669 (having the sequence of DAS); and a CDR3 comprising an amino acid sequence having at least 80%, at least 85%, at least 90%, at least 91%, at least 92%, at least 93%, at least 94%, at least 95%, at least 96%, at least 97%, at least 98%, at least 99% or 100% identity to any one of SEQ ID NOs:41, 49, 57, 65, 73, 169, 177, 185, 262, 270, 278, 286, 519, 527, 535, 543, 551, 559, 567, 575, 583, 591, 599, 607, 615, 623, 645, 653, 662 and 670). In some preferred aspects, CDR1, CDR2 and CDR3 of two of VH1, VH2, VH3, VH4; and CDR1, CDR2 and CDR3 of two of VL1, VL2, VL3 and VL4 have at least 90% identity with the corresponding amino acid sequences specified above. As used herein, “at least 90% identity” includes at least 91%, 92%, 93%, 94%, 95%, 96%, 97%, 98%, 99% and 100% identity to the recited reference sequence. In some particularly preferred aspects, CDR1, CDR2 and CDR3 of two of VH1, VH2, VH3, VH4; and CDR1, CDR2 and CDR3 of two of VL1, VL2, VL3 and VL4 comprise or consist of the corresponding amino acid sequences specified above. In some preferred aspects, CDR1, CDR2 and CDR3 of three of VH1, VH2, VH3, VH4; and CDR1, CDR2 and CDR3 of three of VL1, VL2, VL3 and VL4 have at least 90% identity with the corresponding amino acid sequences specified above. As used herein, “at least 90% identity” includes at least 91%, 92%, 93%, 94%, 95%, 96%, 97%, 98%, 99% and 100% identity to the recited reference sequence. In some particularly preferred aspects, CDR1, CDR2 and CDR3 of three of VH1, VH2, VH3, VH4; and CDR1, CDR2 and CDR3 of three of VL1, VL2, VL3 and VL4 comprise or consist of the corresponding amino acid sequences specified above. In some preferred aspects, CDR1, CDR2 and CDR3 of VH1, VH2, VH3, VH4, VL1, VL2, VL3 and VL4 have at least 90% identity with the corresponding amino acid sequences specified above. As used herein, “at least 90% identity” includes at least 91%, 92%, 93%, 94%, 95%, 96%, 97%, 98%, 99% and 100% identity to the recited reference sequence. In some particularly preferred aspects, CDR1, CDR2 and CDR3 of VH1, VH2, VH3, VH4, VL1, VL2, VL3 and VL4 comprise or consist of the corresponding amino acid sequences specified above.

[0457] In some aspects, VH1 comprises an amino acid sequence having at least 80%, at least 85%, at least 90%, at least 91%, at least 92%, at least 93%, at least 94%, at least 95%, at least 96%, at least 97%, at least 98%, at least 99% or 100% identity to SEQ ID NO:58; VH2 comprises an amino acid sequence having at least 80%, at least 85%, at least 90%, at least 91%, at least 92%, at least 93%, at least 94%, at least 95%, at least 96%, at least 97%, at least 98%, at least 99% or 100% identity to SEQ ID NO:50; VH3 comprises an amino acid sequence having at least 80%, at least 85%, at least 90%, at least 91%, at least 92%, at least 93%, at least 94%, at least 95%, at least 96%, at least 97%, at least 98%, at least 99% or 100% identity to SEQ ID NO:66; VH4 comprises an amino acid sequence having at least 80%, at least 85%, at least 90%, at least 91%, at least 92%, at least 93%, at least 94%, at least 95%, at least 96%, at least 97%, at least 98%, at least 99% or 100% identity to SEQ ID NO:74; VL1 comprises an amino acid sequence having at least 80%, at least 85%, at least 90%, at least 91%, at least 92%, at least 93%, at least 94%, at least 95%, at least 96%, at least 97%, at least 98%, at least 99% or 100% identity to SEQ ID NO:54; VL2 comprises an amino acid sequence having at least 80%, at least 85%, at least 90%, at least 91%, at least 92%, at least 93%, at least 94%, at least 95%, at least 96%, at least 97%, at least 98%, at least 99% or 100% identity to SEQ ID NO:46; VL3 comprises an amino acid sequence having at least 80%, at least 85%, at least 90%, at least 91%, at least 92%, at least 93%, at least 94%, at least 95%, at least 96%, at least 97%, at least 98%, at least 99% or 100% identity to SEQ ID NO:62; and VL4 comprises an amino acid sequence having at least 80%, at least 85%, at least 90%, at least 91%, at least 92%, at least 93%, at least 94%, at least 95%, at least 96%, at least 97%, at least 98%, at least 99% or 100% identity to SEQ ID NO:38. In some aspects, the linker between VL1 and VL2 has at least 80%, at least 85%, at least 90%, at least 91%, at least 92%, at least 93%, at least 94%, at least 95%, at least 96%, at least 97%, at least 98%, at least 99% or 100% identity to SEQ ID NO:6. In some aspects, the linker between VL2 and VH2 has at least 80%, at least 85%, at least 90%, at least 91%, at least 92%, at least 93%, at least 94%, at least 95%, at least 96%, at least 97%, at least 98%, at least 99% or 100% identity to SEQ ID NO:27. In some aspects, the linker between VH2 and VH1 has at least 80%, at least 85%, at least 90%, at least 91%, at least 92%, at least 93%, at least 94%, at least 95%, at least 96%, at least 97%, at least 98%, at least 99% or 100% identity to SEQ ID NO:6. In some aspects, the linker between VL3 and VL4 has at least 80%, at least 85%, at least 90%, at least 91%, at least 92%, at least 93%, at least 94%, at least 95%, at least 96%, at least 97%, at least 98%, at least 99% or 100% identity to SEQ ID NO:6. In some aspects, the linker between VL4 and VH4 has at least 80%, at least 85%, at least 90%, at least 91%, at least 92%, at least 93%, at least 94%, at least 95%, at least 96%, at least 97%, at least 98%, at least 99% or 100% identity to SEQ ID NO:27. In some aspects, the linker between VH4 and VH3 has at least 80%, at least 85%, at least 90%, at least 91%, at least 92%, at least 93%, at least 94%, at least 95%, at least 96%, at least 97%, at least 98%, at least 99% or 100% identity to SEQ ID NO:6. In some preferred aspects, VH1, VH2, VH3, VH4, VL1, VL2, VL3 and VL4 have at least 90% identity with the corresponding amino acid sequences specified above. As used herein, “at least 90% identity” includes at least 91%, 92%, 93%, 94%, 95%, 96%, 97%, 98%, 99% and 100% identity to the recited reference sequence. In some particularly preferred aspects, VH1, VH2, VH3, VH4, VL1, VL2, VL3 and VL4 comprise or consist of the corresponding amino acid sequences specified above.

[0458] In some aspects, VH1 comprises an amino acid sequence of SEQ ID NO:58; VH2 comprises an amino acid sequence of SEQ ID NO:50; VH3 comprises an amino acid sequence of SEQ ID NO:66; VH4 comprises an amino acid sequence of SEQ ID NO:74; VL1 comprises an amino acid sequence of SEQ ID NO:54; VL2 comprises an amino acid sequence of SEQ ID NO:46; VL3 comprises an amino acid sequence of SEQ ID NO:62; and VL4 comprises an amino acid of SEQ ID NO:38. In some aspects, the linker between VL1 and VL2 is SEQ ID NO:6. In some aspects, the linker between VL2 and VH2 is SEQ ID NO:27. In some aspects, the linker between VH2 and VH1 is SEQ ID NO:6. In some aspects, the linker between VL3 and VL4 is SEQ ID NO:6. In some aspects, the linker between VL4 and VH4 is SEQ ID NO:27. In some aspects, the linker between VH4 and VH3 is SEQ ID NO:6.

[0459] In some aspects, VH2 comprises the same CDR1, CDR2 and CDR3 regions as VH4. In some aspects, VL2 comprises the same CDR1, CDR2 and CDR3 regions as VL4. In some aspects, VH2 comprises the same CDR1, CDR2 and CDR3 regions as VH4, and VL2 comprises the same CDR1, CDR2 and CDR3 regions as VL4. In some aspects, VH1 comprises different CDR1, CDR2 and CDR3 regions than VH3 and/or VL1 comprises different CDR1, CDR2 and CDR3 regions than VL3.

[0460] In some aspects, VH2 CDR1 and VH4 CDR1 each comprise the same amino acid sequence having at least 80%, at least 85%, at least 90%, at least 91%, at least 92%, at least 93%, at least 94%, at least 95%, at least 96%, at least 97%, at least 98%, at least 99% or 100% identity to SEQ ID NO:43; VH2 CDR2 and VH4 CDR2 each comprise the same amino acid sequence having at least 80%, at least 85%, at least 90%, at least 91%, at least 92%, at least 93%, at least 94%, at least 95%, at least 96%, at least 97%, at least 98%, at least 99% or 100% identity to SEQ ID NO:44; VH2 CDR3 and VH4 CDR3 each comprise the same amino acid sequence having at least 80%, at least 85%, at least 90%, at least 91%, at least 92%, at least 93%, at least 94%, at least 95%, at least 96%, at least 97%, at least 98%, at least 99% or 100% identity to SEQ ID NO:45; VL2 CDR1 and VL2 CDR1 each comprise the same amino acid sequence having at least 80%, at least 85%, at least 90%, at least 91%, at least 92%, at least 93%, at least 94%, at least 95%, at least 96%, at least 97%, at least 98%, at least 99% or 100% identity to SEQ ID NO:39; VL2 CDR2 and VL4 CDR2 each comprise the same amino acid sequence having at least 80%, at least 85%, at least 90%, at least 91%, at least 92%, at least 93%, at least 94%, at least 95%, at least 96%, at least 97%, at least 98%, at least 99% or 100% identity to SEQ ID NO:40 (having the sequence of GAS); VL2 CDR3 and VL4 CDR3 each comprise the same amino acid sequence having at least 80%, at least 85%, at least 90%, at least 91%, at least 92%, at least 93%, at least 94%, at least 95%, at least 96%, at least 97%, at least 98%, at least 99% or 100% identity to SEQ ID NO:41. In some aspects, VH1 CDR1 comprises an amino acid sequence having at least 80%, at least 85%, at least 90%, at least 91%, at least 92%, at least 93%, at least 94%, at least 95%, at least 96%, at least 97%, at least 98%, at least 99% or 100% identity to SEQ ID NO:67; VH1 CDR2 comprises an amino acid sequence having at least 80%, at least 85%, at least 90%, at least 91%, at least 92%, at least 93%, at least 94%, at least 95%, at least 96%, at least 97%, at least 98%, at least 99% or 100% identity to SEQ ID NO:68; VH1 CDR3 comprises an amino acid sequence having at least 80%, at least 85%, at least 90%, at least 91%, at least 92%, at least 93%, at least 94%, at least 95%, at least 96%, at least 97%, at least 98%, at least 99% or 100% identity to SEQ ID NO:69; VL1 CDR1 comprises an amino acid sequence having at least 80%, at least 85%, at least 90%, at least 91%, at least 92%, at least 93%, at least 94%, at least 95%, at least 96%, at least 97%, at least 98%, at least 99% or 100% identity to SEQ ID NO:63; VL1 CDR2 comprises an amino acid sequence having at least 80%, at least 85%, at least 90%, at least 91%, at least 92%, at least 93%, at least 94%, at least 95%, at least 96%, at least 97%, at least 98%, at least 99% or 100% identity to SEQ ID NO:64 (having the sequence of DAS); and VL1 CDR3 comprises an amino acid sequence having at least 80%, at least 85%, at least 90%, at least 91%, at least 92%, at least 93%, at least 94%, at least 95%, at least 96%, at least 97%, at least 98%, at least 99% or 100% identity to SEQ ID NO:65. In some aspects, VH3 CDR1 comprises an amino acid sequence having at least 80%, at least 85%, at least 90%, at least 91%, at least 92%, at least 93%, at least 94%, at least 95%, at least 96%, at least 97%, at least 98%, at least 99% or 100% identity to SEQ ID NO:59; VH3 CDR2 comprises an amino acid sequence having at least 80%, at least 85%, at least 90%, at least 91%, at least 92%, at least 93%, at least 94%, at least 95%, at least 96%, at least 97%, at least 98%, at least 99% or 100% identity to SEQ ID NO:60; VH3 CDR3 comprises an amino acid sequence having at least 80%, at least 85%, at least 90%, at least 91%, at least 92%, at least 93%, at least 94%, at least 95%, at least 96%, at least 97%, at least 98%, at least 99% or 100% identity to SEQ ID NO:61; VL3 CDR1 comprises an amino acid sequence having at least 80%, at least 85%, at least 90%, at least 91%, at least 92%, at least 93%, at least 94%, at least 95%, at least 96%, at least 97%, at least 98%, at least 99% or 100% identity to SEQ ID NO:55; VL3 CDR2 comprises an amino acid sequence having at least 80%, at least 85%, at least 90%, at least 91%, at least 92%, at least 93%, at least 94%, at least 95%, at least 96%, at least 97%, at least 98%, at least 99% or 100% identity to SEQ ID NO:56 (having the sequence of GTN); and VL3 CDR3 comprises an amino acid sequence having at least 80%, at least 85%, at least 90%, at least 91%, at least 92%, at least 93%, at least 94%, at least 95%, at least 96%, at least 97%, at least 98%, at least 99% or 100% identity to SEQ ID NO:57. In some preferred aspects, CDR1, CDR2 and CDR3 of VH1, VH2, VH3, VH4, VL1, VL2, VL3 and VL4 have at least 90% identity with the corresponding amino acid sequences specified above. As used herein, “at least 90% identity” includes at least 91%, 92%, 93%, 94%, 95%, 96%, 97%, 98%, 99% and 100% identity to the recited reference sequence. In some particularly preferred aspects, CDR1, CDR2 and CDR3 of VH1, VH2, VH3, VH4, VL1, VL2, VL3 and VL4 comprise or consist of the corresponding amino acid sequences specified above.

[0461] In some aspects, VH2 CDR1 and VH4 CDR1 each comprise the same amino acid sequence having at least 80%, at least 85%, at least 90%, at least 91%, at least 92%, at least 93%, at least 94%, at least 95%, at least 96%, at least 97%, at least 98%, at least 99% or 100% identity to SEQ ID NO:51; VH2 CDR2 and VH4 CDR2 each comprise the same amino acid sequence having at least 80%, at least 85%, at least 90%, at least 91%, at least 92%, at least 93%, at least 94%, at least 95%, at least 96%, at least 97%, at least 98%, at least 99% or 100% identity to SEQ ID NO:52; VH2 CDR3 and VH4 CDR3 each comprise the same amino acid sequence having at least 80%, at least 85%, at least 90%, at least 91%, at least 92%, at least 93%, at least 94%, at least 95%, at least 96%, at least 97%, at least 98%, at least 99% or 100% identity to SEQ ID NO:53; VL2 CDR1 and VL4 CDR1 each comprise the same amino acid sequence having at least 80%, at least 85%, at least 90%, at least 91%, at least 92%, at least 93%, at least 94%, at least 95%, at least 96%, at least 97%, at least 98%, at least 99% or 100% identity to SEQ ID NO:47; VL2 CDR2 and VL4 CDR2 each comprise the same amino acid sequence having at least 80%, at least 85%, at least 90%, at least 91%, at least 92%, at least 93%, at least 94%, at least 95%, at least 96%, at least 97%, at least 98%, at least 99% or 100% identity to SEQ ID NO:48 (having the sequence of GAS); and VL2 CDR3 and VL4 CDR3 each comprise the same amino acid sequence having at least 80%, at least 85%, at least 90%, at least 91%, at least 92%, at least 93%, at least 94%, at least 95%, at least 96%, at least 97%, at least 98%, at least 99% or 100% identity to SEQ ID NO:49. In some aspects, VH1 CDR1 comprises an amino acid sequence having at least 80%, at least 85%, at least 90%, at least 91%, at least 92%, at least 93%, at least 94%, at least 95%, at least 96%, at least 97%, at least 98%, at least 99% or 100% identity to SEQ ID NO:59; VH1 CDR2 comprises an amino acid sequence having at least 80%, at least 85%, at least 90%, at least 91%, at least 92%, at least 93%, at least 94%, at least 95%, at least 96%, at least 97%, at least 98%, at least 99% or 100% identity to SEQ ID NO:60; VH1 CDR3 comprises an amino acid sequence having at least 80%, at least 85%, at least 90%, at least 91%, at least 92%, at least 93%, at least 94%, at least 95%, at least 96%, at least 97%, at least 98%, at least 99% or 100% identity to SEQ ID NO:61; VL1 CDR1 comprises an amino acid sequence having at least 80%, at least 85%, at least 90%, at least 91%, at least 92%, at least 93%, at least 94%, at least 95%, at least 96%, at least 97%, at least 98%, at least 99% or 100% identity to SEQ ID NO:55; VL1 CDR2 comprises an amino acid sequence having at least 80%, at least 85%, at least 90%, at least 91%, at least 92%, at least 93%, at least 94%, at least 95%, at least 96%, at least 97%, at least 98%, at least 99% or 100% identity to SEQ ID NO:56 (having the sequence of GTN); and VL1 CDR3 comprises an amino acid sequence having at least 80%, at least 85%, at least 90%, at least 91%, at least 92%, at least 93%, at least 94%, at least 95%, at least 96%, at least 97%, at least 98%, at least 99% or 100% identity to SEQ ID NO:57. In some aspects, VH3 CDR1 comprises an amino acid sequence having at least 80%, at least 85%, at least 90%, at least 91%, at least 92%, at least 93%, at least 94%, at least 95%, at least 96%, at least 97%, at least 98%, at least 99% or 100% identity to SEQ ID NO:67; VH3 CDR2 comprises an amino acid sequence having at least 80%, at least 85%, at least 90%, at least 91%, at least 92%, at least 93%, at least 94%, at least 95%, at least 96%, at least 97%, at least 98%, at least 99% or 100% identity to SEQ ID NO:68; VH3 CDR3 comprises an amino acid sequence having at least 80%, at least 85%, at least 90%, at least 91%, at least 92%, at least 93%, at least 94%, at least 95%, at least 96%, at least 97%, at least 98%, at least 99% or 100% identity to SEQ ID NO:69; VL3 CDR1 comprises an amino acid sequence having at least 80%, at least 85%, at least 90%, at least 91%, at least 92%, at least 93%, at least 94%, at least 95%, at least 96%, at least 97%, at least 98%, at least 99% or 100% identity to SEQ ID NO:63; VL3 CDR2 comprises an amino acid sequence having at least 80%, at least 85%, at least 90%, at least 91%, at least 92%, at least 93%, at least 94%, at least 95%, at least 96%, at least 97%, at least 98%, at least 99% or 100% identity to SEQ ID NO:64 (having the sequence of DAS); and VL3 CDR3 comprises an amino acid sequence having at least 80%, at least 85%, at least 90%, at least 91%, at least 92%, at least 93%, at least 94%, at least 95%, at least 96%, at least 97%, at least 98%, at least 99% or 100% identity to SEQ ID NO:65. In some preferred aspects, CDR1, CDR2 and CDR3 of VH1, VH2, VH3, VH4, VL1, VL2, VL3 and VL4 have at least 90% identity with the corresponding amino acid sequences specified above. As used herein, “at least 90% identity” includes at least 91%, 92%, 93%, 94%, 95%, 96%, 97%, 98%, 99% and 100% identity to the recited reference sequence. In some particularly preferred aspects, CDR1, CDR2 and CDR3 of VH1, VH2, VH3, VH4, VL1, VL2, VL3 and VL4 comprise or consist of the corresponding amino acid sequences specified above.

[0462] In some aspects, VH2 comprises the same CDR1, CDR2 and CDR3 regions as VH3. In some aspects, VL2 comprises the same CDR1, CDR2 and CDR3 regions as VL3. In some aspects, VH2 comprises the same CDR1, CDR2 and CDR3 regions as VH3, and VL2 comprises the same CDR1, CDR2 and CDR3 regions as VL3. In some aspects, VH1 comprises different CDR1, CDR2 and CDR3 regions than VH4 and/or VL1 comprises different CDR1, CDR2 and CDR3 regions than VL4.

[0463] In some aspects, VH2 CDR1 and VH3 CDR1 each comprise the same amino acid sequence having at least 80%, at least 85%, at least 90%, at least 91%, at least 92%, at least 93%, at least 94%, at least 95%, at least 96%, at least 97%, at least 98%, at least 99% or 100% identity to SEQ ID NO:43; VH2 CDR2 and VH3 CDR2 each comprise the same amino acid sequence having at least 80%, at least 85%, at least 90%, at least 91%, at least 92%, at least 93%, at least 94%, at least 95%, at least 96%, at least 97%, at least 98%, at least 99% or 100% identity to SEQ ID NO:44; VH2 CDR3 and VH3 CDR3 each comprise the same amino acid sequence having at least 80%, at least 85%, at least 90%, at least 91%, at least 92%, at least 93%, at least 94%, at least 95%, at least 96%, at least 97%, at least 98%, at least 99% or 100% identity to SEQ ID NO:45; VL2 CDR1 and VL3 CDR1 each comprise the same amino acid sequence having at least 80%, at least 85%, at least 90%, at least 91%, at least 92%, at least 93%, at least 94%, at least 95%, at least 96%, at least 97%, at least 98%, at least 99% or 100% identity to SEQ ID NO:39; VL2 CDR2 and VL3 CDR2 each comprise the same amino acid sequence having at least 80%, at least 85%, at least 90%, at least 91%, at least 92%, at least 93%, at least 94%, at least 95%, at least 96%, at least 97%, at least 98%, at least 99% or 100% identity to SEQ ID NO:40 (having the sequence of GAS); and VL2 CDR3 and VL3 CDR3 each comprise the same amino acid sequence having at least 80%, at least 85%, at least 90%, at least 91%, at least 92%, at least 93%, at least 94%, at least 95%, at least 96%, at least 97%, at least 98%, at least 99% or 100% identity to SEQ ID NO:41. In some aspects, VH1 CDR1 comprises an amino acid sequence having at least 80%, at least 85%, at least 90%, at least 91%, at least 92%, at least 93%, at least 94%, at least 95%, at least 96%, at least 97%, at least 98%, at least 99% or 100% identity to SEQ ID NO:67; VH1 CDR2 comprises an amino acid sequence having at least 80%, at least 85%, at least 90%, at least 91%, at least 92%, at least 93%, at least 94%, at least 95%, at least 96%, at least 97%, at least 98%, at least 99% or 100% identity to SEQ ID NO:68; VH1 CDR3 comprises an amino acid sequence having at least 80%, at least 85%, at least 90%, at least 91%, at least 92%, at least 93%, at least 94%, at least 95%, at least 96%, at least 97%, at least 98%, at least 99% or 100% identity to SEQ ID NO:69; VL1 CDR1 comprises an amino acid sequence having at least 80%, at least 85%, at least 90%, at least 91%, at least 92%, at least 93%, at least 94%, at least 95%, at least 96%, at least 97%, at least 98%, at least 99% or 100% identity to SEQ ID NO:63; VL1 CDR2 comprises an amino acid sequence having at least 80%, at least 85%, at least 90%, at least 91%, at least 92%, at least 93%, at least 94%, at least 95%, at least 96%, at least 97%, at least 98%, at least 99% or 100% identity to SEQ ID NO:64 (having the sequence of DAS); and VL1 CDR3 comprises an amino acid sequence having at least 80%, at least 85%, at least 90%, at least 91%, at least 92%, at least 93%, at least 94%, at least 95%, at least 96%, at least 97%, at least 98%, at least 99% or 100% identity to SEQ ID NO:65. In some aspects, VH4 CDR1 comprises an amino acid sequence having at least 80%, at least 85%, at least 90%, at least 91%, at least 92%, at least 93%, at least 94%, at least 95%, at least 96%, at least 97%, at least 98%, at least 99% or 100% identity to SEQ ID NO:59; VH4 CDR2 comprises an amino acid sequence having at least 80%, at least 85%, at least 90%, at least 91%, at least 92%, at least 93%, at least 94%, at least 95%, at least 96%, at least 97%, at least 98%, at least 99% or 100% identity to SEQ ID NO:60; VH4 CDR3 comprises an amino acid sequence having at least 80%, at least 85%, at least 90%, at least 91%, at least 92%, at least 93%, at least 94%, at least 95%, at least 96%, at least 97%, at least 98%, at least 99% or 100% identity to SEQ ID NO:61; VL4 CDR1 comprises an amino acid sequence having at least 80%, at least 85%, at least 90%, at least 91%, at least 92%, at least 93%, at least 94%, at least 95%, at least 96%, at least 97%, at least 98%, at least 99% or 100% identity to SEQ ID NO:55; VL4 CDR2 comprises an amino acid sequence having at least 80%, at least 85%, at least 90%, at least 91%, at least 92%, at least 93%, at least 94%, at least 95%, at least 96%, at least 97%, at least 98%, at least 99% or 100% identity to SEQ ID NO:56 (having the sequence of GTN); and VL4 CDR3 comprises an amino acid sequence having at least 80%, at least 85%, at least 90%, at least 91%, at least 92%, at least 93%, at least 94%, at least 95%, at least 96%, at least 97%, at least 98%, at least 99% or 100% identity to SEQ ID NO:57. In some preferred aspects, CDR1, CDR2 and CDR3 of VH1, VH2, VH3, VH4, VL1, VL2, VL3 and VL4 have at least 90% identity with the corresponding amino acid sequences specified above. As used herein, “at least 90% identity” includes at least 91%, 92%, 93%, 94%, 95%, 96%, 97%, 98%, 99% and 100% identity to the recited reference sequence. In some particularly preferred aspects, CDR1, CDR2 and CDR3 of VH1, VH2, VH3, VH4, VL1, VL2, VL3 and VL4 comprise or consist of the corresponding amino acid sequences specified above.

[0464] In some aspects, VH2 CDR1 and VH3 CDR1 each comprise the same amino acid sequence having at least 80%, at least 85%, at least 90%, at least 91%, at least 92%, at least 93%, at least 94%, at least 95%, at least 96%, at least 97%, at least 98%, at least 99% or 100% identity to SEQ ID NO:51; VH2 CDR2 and VH3 CDR2 each comprise the same amino acid sequence having at least 80%, at least 85%, at least 90%, at least 91%, at least 92%, at least 93%, at least 94%, at least 95%, at least 96%, at least 97%, at least 98%, at least 99% or 100% identity to SEQ ID NO:52; VH2 CDR3 and VH3 CDR3 each comprise the same amino acid sequence having at least 80%, at least 85%, at least 90%, at least 91%, at least 92%, at least 93%, at least 94%, at least 95%, at least 96%, at least 97%, at least 98%, at least 99% or 100% identity to SEQ ID NO:53; VL2 CDR1 and VL3 CDR1 each comprise the same amino acid sequence having at least 80%, at least 85%, at least 90%, at least 91%, at least 92%, at least 93%, at least 94%, at least 95%, at least 96%, at least 97%, at least 98%, at least 99% or 100% identity to SEQ ID NO:47; VL2 CDR2 and VL3 CDR2 each comprise the same amino acid sequence having at least 80%, at least 85%, at least 90%, at least 91%, at least 92%, at least 93%, at least 94%, at least 95%, at least 96%, at least 97%, at least 98%, at least 99% or 100% identity to SEQ ID NO:48 (having the sequence of GAS); and VL2 CDR3 and VL3 CDR3 each comprise the same amino acid sequence having at least 80%, at least 85%, at least 90%, at least 91%, at least 92%, at least 93%, at least 94%, at least 95%, at least 96%, at least 97%, at least 98%, at least 99% or 100% identity to SEQ ID NO:49. In some aspects, VH1 CDR1 comprises an amino acid sequence having at least 80%, at least 85%, at least 90%, at least 91%, at least 92%, at least 93%, at least 94%, at least 95%, at least 96%, at least 97%, at least 98%, at least 99% or 100% identity to SEQ ID NO:59; VH1 CDR2 comprises an amino acid sequence having at least 80%, at least 85%, at least 90%, at least 91%, at least 92%, at least 93%, at least 94%, at least 95%, at least 96%, at least 97%, at least 98%, at least 99% or 100% identity to SEQ ID NO:60; VH1 CDR3 comprises an amino acid sequence having at least 80%, at least 85%, at least 90%, at least 91%, at least 92%, at least 93%, at least 94%, at least 95%, at least 96%, at least 97%, at least 98%, at least 99% or 100% identity to SEQ ID NO:61; VL1 CDR1 comprises an amino acid sequence having at least 80%, at least 85%, at least 90%, at least 91%, at least 92%, at least 93%, at least 94%, at least 95%, at least 96%, at least 97%, at least 98%, at least 99% or 100% identity to SEQ ID NO:55; VL1 CDR2 comprises an amino acid sequence having at least 80%, at least 85%, at least 90%, at least 91%, at least 92%, at least 93%, at least 94%, at least 95%, at least 96%, at least 97%, at least 98%, at least 99% or 100% identity to SEQ ID NO:56 (having the sequence of GTN); and VL1 CDR3 comprises an amino acid sequence having at least 80%, at least 85%, at least 90%, at least 91%, at least 92%, at least 93%, at least 94%, at least 95%, at least 96%, at least 97%, at least 98%, at least 99% or 100% identity to SEQ ID NO:57. In some aspects, VH4 CDR1 comprises an amino acid sequence having at least 80%, at least 85%, at least 90%, at least 91%, at least 92%, at least 93%, at least 94%, at least 95%, at least 96%, at least 97%, at least 98%, at least 99% or 100% identity to SEQ ID NO:67; VH4 CDR2 comprises an amino acid sequence having at least 80%, at least 85%, at least 90%, at least 91%, at least 92%, at least 93%, at least 94%, at least 95%, at least 96%, at least 97%, at least 98%, at least 99% or 100% identity to SEQ ID NO:68; VH4 CDR3 comprises an amino acid sequence having at least 80%, at least 85%, at least 90%, at least 91%, at least 92%, at least 93%, at least 94%, at least 95%, at least 96%, at least 97%, at least 98%, at least 99% or 100% identity to SEQ ID NO:69; VL4 CDR1 comprises an amino acid sequence having at least 80%, at least 85%, at least 90%, at least 91%, at least 92%, at least 93%, at least 94%, at least 95%, at least 96%, at least 97%, at least 98%, at least 99% or 100% identity to SEQ ID NO:63; VL4 CDR2 comprises an amino acid sequence having at least 80%, at least 85%, at least 90%, at least 91%, at least 92%, at least 93%, at least 94%, at least 95%, at least 96%, at least 97%, at least 98%, at least 99% or 100% identity to SEQ ID NO:64 (having the sequence of DAS); and VL4 CDR3 comprises an amino acid sequence having at least 80%, at least 85%, at least 90%, at least 91%, at least 92%, at least 93%, at least 94%, at least 95%, at least 96%, at least 97%, at least 98%, at least 99% or 100% identity to SEQ ID NO:65. In some preferred aspects, CDR1, CDR2 and CDR3 of VH1, VH2, VH3, VH4, VL1, VL2, VL3 and VL4 have at least 90% identity with the corresponding amino acid sequences specified above. As used herein, “at least 90% identity” includes at least 91%, 92%, 93%, 94%, 95%, 96%, 97%, 98%, 99% and 100% identity to the recited reference sequence. In some particularly preferred aspects, CDR1, CDR2 and CDR3 of VH1, VH2, VH3, VH4, VL1, VL2, VL3 and VL4 comprise or consist of the corresponding amino acid sequences specified above.

[0465] In some aspects, VH1 comprises the same CDR1, CDR2 and CDR3 regions as VH4. In some aspects, VL1 comprises the same CDR1, CDR2 and CDR3 regions as VL4. In some aspects, VH1 comprises the same CDR1, CDR2 and CDR3 regions as VH4, and VL1 comprises the same CDR1, CDR2 and CDR3 regions as VL4. In some aspects, VH2 comprises different CDR1, CDR2 and CDR3 regions than VH3 and/or VL2 comprises different CDR1, CDR2 and CDR3 regions than VL3.

[0466] In some aspects, VH1 CDR1 and VH4 CDR1 each comprise the same amino acid sequence having at least 80%, at least 85%, at least 90%, at least 91%, at least 92%, at least 93%, at least 94%, at least 95%, at least 96%, at least 97%, at least 98%, at least 99% or 100% identity to SEQ ID NO:43; VH1 CDR2 and VH4 CDR2 each comprise the same amino acid sequence having at least 80%, at least 85%, at least 90%, at least 91%, at least 92%, at least 93%, at least 94%, at least 95%, at least 96%, at least 97%, at least 98%, at least 99% or 100% identity to SEQ ID NO:44; VH1 CDR3 and VH4 CDR3 each comprise the same amino acid sequence having at least 80%, at least 85%, at least 90%, at least 91%, at least 92%, at least 93%, at least 94%, at least 95%, at least 96%, at least 97%, at least 98%, at least 99% or 100% identity to SEQ ID NO:45; VL1 CDR1 and VL4 CDR1 each comprise the same amino acid sequence having at least 80%, at least 85%, at least 90%, at least 91%, at least 92%, at least 93%, at least 94%, at least 95%, at least 96%, at least 97%, at least 98%, at least 99% or 100% identity to SEQ ID NO:39; VL1 CDR2 and VL4 CDR2 each comprise the same amino acid sequence having at least 80%, at least 85%, at least 90%, at least 91%, at least 92%, at least 93%, at least 94%, at least 95%, at least 96%, at least 97%, at least 98%, at least 99% or 100% identity to SEQ ID NO:40 (having the sequence of GAS); and VL1 CDR3 and VL4 CDR3 each comprise the same amino acid sequence having at least 80%, at least 85%, at least 90%, at least 91%, at least 92%, at least 93%, at least 94%, at least 95%, at least 96%, at least 97%, at least 98%, at least 99% or 100% identity to SEQ ID NO:41. In some aspects, VH2 CDR1 comprises an amino acid sequence having at least 80%, at least 85%, at least 90%, at least 91%, at least 92%, at least 93%, at least 94%, at least 95%, at least 96%, at least 97%, at least 98%, at least 99% or 100% identity to SEQ ID NO:67; VH2 CDR2 comprises an amino acid sequence having at least 80%, at least 85%, at least 90%, at least 91%, at least 92%, at least 93%, at least 94%, at least 95%, at least 96%, at least 97%, at least 98%, at least 99% or 100% identity to SEQ ID NO:68; VH2 CDR3 comprises an amino acid sequence having at least 80%, at least 85%, at least 90%, at least 91%, at least 92%, at least 93%, at least 94%, at least 95%, at least 96%, at least 97%, at least 98%, at least 99% or 100% identity to SEQ ID NO:69; VL2 CDR1 comprises an amino acid sequence having at least 80%, at least 85%, at least 90%, at least 91%, at least 92%, at least 93%, at least 94%, at least 95%, at least 96%, at least 97%, at least 98%, at least 99% or 100% identity to SEQ ID NO:63; VL2 CDR2 comprises an amino acid sequence having at least 80%, at least 85%, at least 90%, at least 91%, at least 92%, at least 93%, at least 94%, at least 95%, at least 96%, at least 97%, at least 98%, at least 99% or 100% identity to SEQ ID NO:64 (having the sequence of DAS); and VL2 CDR3 comprises an amino acid sequence having at least 80%, at least 85%, at least 90%, at least 91%, at least 92%, at least 93%, at least 94%, at least 95%, at least 96%, at least 97%, at least 98%, at least 99% or 100% identity to SEQ ID NO:65. In some aspects, VH3 CDR1 comprises an amino acid sequence having at least 80%, at least 85%, at least 90%, at least 91%, at least 92%, at least 93%, at least 94%, at least 95%, at least 96%, at least 97%, at least 98%, at least 99% or 100% identity to SEQ ID NO:59; VH3 CDR2 comprises an amino acid sequence having at least 80%, at least 85%, at least 90%, at least 91%, at least 92%, at least 93%, at least 94%, at least 95%, at least 96%, at least 97%, at least 98%, at least 99% or 100% identity to SEQ ID NO:60; VH3 CDR3 comprises an amino acid sequence having at least 80%, at least 85%, at least 90%, at least 91%, at least 92%, at least 93%, at least 94%, at least 95%, at least 96%, at least 97%, at least 98%, at least 99% or 100% identity to SEQ ID NO:61; VL3 CDR1 comprises an amino acid sequence having at least 80%, at least 85%, at least 90%, at least 91%, at least 92%, at least 93%, at least 94%, at least 95%, at least 96%, at least 97%, at least 98%, at least 99% or 100% identity to SEQ ID NO:55; VL3 CDR2 comprises an amino acid sequence having at least 80%, at least 85%, at least 90%, at least 91%, at least 92%, at least 93%, at least 94%, at least 95%, at least 96%, at least 97%, at least 98%, at least 99% or 100% identity to SEQ ID NO:56 (having the sequence of GTN); and VL3 CDR3 comprises an amino acid sequence having at least 80%, at least 85%, at least 90%, at least 91%, at least 92%, at least 93%, at least 94%, at least 95%, at least 96%, at least 97%, at least 98%, at least 99% or 100% identity to SEQ ID NO:57. In some preferred aspects, CDR1, CDR2 and CDR3 of VH1, VH2, VH3, VH4, VL1, VL2, VL3 and VL4 have at least 90% identity with the corresponding amino acid sequences specified above. As used herein, “at least 90% identity” includes at least 91%, 92%, 93%, 94%, 95%, 96%, 97%, 98%, 99% and 100% identity to the recited reference sequence. In some particularly preferred aspects, CDR1, CDR2 and CDR3 of VH1, VH2, VH3, VH4, VL1, VL2, VL3 and VL4 comprise or consist of the corresponding amino acid sequences specified above.

[0467] In some aspects, VH1 CDR1 and VH4 CDR1 each comprise the same amino acid sequence having at least 80%, at least 85%, at least 90%, at least 91%, at least 92%, at least 93%, at least 94%, at least 95%, at least 96%, at least 97%, at least 98%, at least 99% or 100% identity to SEQ ID NO:51; VH1 CDR2 and VH4 CDR2 each comprise the same amino acid sequence having at least 80%, at least 85%, at least 90%, at least 91%, at least 92%, at least 93%, at least 94%, at least 95%, at least 96%, at least 97%, at least 98%, at least 99% or 100% identity to SEQ ID NO:52; VH1 CDR3 and VH4 CDR3 each comprise the same amino acid sequence having at least 80%, at least 85%, at least 90%, at least 91%, at least 92%, at least 93%, at least 94%, at least 95%, at least 96%, at least 97%, at least 98%, at least 99% or 100% identity to SEQ ID NO:53; VL1 CDR1 and VL4 CDR1 each comprise the same amino acid sequence having at least 80%, at least 85%, at least 90%, at least 91%, at least 92%, at least 93%, at least 94%, at least 95%, at least 96%, at least 97%, at least 98%, at least 99% or 100% identity to SEQ ID NO:47; VL1 CDR2 and VL4 CDR2 each comprise the same amino acid sequence having at least 80%, at least 85%, at least 90%, at least 91%, at least 92%, at least 93%, at least 94%, at least 95%, at least 96%, at least 97%, at least 98%, at least 99% or 100% identity to SEQ ID NO:48 (having the sequence of GAS); and VL1 CDR3 and VL4 CDR3 each comprise the same amino acid sequence having at least 80%, at least 85%, at least 90%, at least 91%, at least 92%, at least 93%, at least 94%, at least 95%, at least 96%, at least 97%, at least 98%, at least 99% or 100% identity to SEQ ID NO:49. In some aspects, VH2 CDR1 comprises an amino acid sequence having at least 80%, at least 85%, at least 90%, at least 91%, at least 92%, at least 93%, at least 94%, at least 95%, at least 96%, at least 97%, at least 98%, at least 99% or 100% identity to SEQ ID NO:59; VH2 CDR2 comprises an amino acid sequence having at least 80%, at least 85%, at least 90%, at least 91%, at least 92%, at least 93%, at least 94%, at least 95%, at least 96%, at least 97%, at least 98%, at least 99% or 100% identity to SEQ ID NO:60; VH2 CDR3 comprises an amino acid sequence having at least 80%, at least 85%, at least 90%, at least 91%, at least 92%, at least 93%, at least 94%, at least 95%, at least 96%, at least 97%, at least 98%, at least 99% or 100% identity to SEQ ID NO:61; VL2 CDR1 comprises an amino acid sequence having at least 80%, at least 85%, at least 90%, at least 91%, at least 92%, at least 93%, at least 94%, at least 95%, at least 96%, at least 97%, at least 98%, at least 99% or 100% identity to SEQ ID NO:55; VL2 CDR2 comprises an amino acid sequence having at least 80%, at least 85%, at least 90%, at least 91%, at least 92%, at least 93%, at least 94%, at least 95%, at least 96%, at least 97%, at least 98%, at least 99% or 100% identity to SEQ ID NO:56 (having the sequence of GTN); and VL2 CDR3 comprises an amino acid sequence having at least 80%, at least 85%, at least 90%, at least 91%, at least 92%, at least 93%, at least 94%, at least 95%, at least 96%, at least 97%, at least 98%, at least 99% or 100% identity to SEQ ID NO:57. In some aspects, VH3 CDR1 comprises an amino acid sequence having at least 80%, at least 85%, at least 90%, at least 91%, at least 92%, at least 93%, at least 94%, at least 95%, at least 96%, at least 97%, at least 98%, at least 99% or 100% identity to SEQ ID NO:67; VH3 CDR2 comprises an amino acid sequence having at least 80%, at least 85%, at least 90%, at least 91%, at least 92%, at least 93%, at least 94%, at least 95%, at least 96%, at least 97%, at least 98%, at least 99% or 100% identity to SEQ ID NO:68; VH3 CDR3 comprises an amino acid sequence having at least 80%, at least 85%, at least 90%, at least 91%, at least 92%, at least 93%, at least 94%, at least 95%, at least 96%, at least 97%, at least 98%, at least 99% or 100% identity to SEQ ID NO:69; VL3 CDR1 comprises an amino acid sequence having at least 80%, at least 85%, at least 90%, at least 91%, at least 92%, at least 93%, at least 94%, at least 95%, at least 96%, at least 97%, at least 98%, at least 99% or 100% identity to SEQ ID NO:63; VL3 CDR2 comprises an amino acid sequence having at least 80%, at least 85%, at least 90%, at least 91%, at least 92%, at least 93%, at least 94%, at least 95%, at least 96%, at least 97%, at least 98%, at least 99% or 100% identity to SEQ ID NO:64 (having the sequence of DAS); and VL3 CDR3 comprises an amino acid sequence having at least 80%, at least 85%, at least 90%, at least 91%, at least 92%, at least 93%, at least 94%, at least 95%, at least 96%, at least 97%, at least 98%, at least 99% or 100% identity to SEQ ID NO:65. In some preferred aspects, CDR1, CDR2 and CDR3 of VH1, VH2, VH3, VH4, VL1, VL2, VL3 and VL4 have at least 90% identity with the corresponding amino acid sequences specified above. As used herein, “at least 90% identity” includes at least 91%, 92%, 93%, 94%, 95%, 96%, 97%, 98%, 99% and 100% identity to the recited reference sequence. In some particularly preferred aspects, CDR1, CDR2 and CDR3 of VH1, VH2, VH3, VH4, VL1, VL2, VL3 and VL4 comprise or consist of the corresponding amino acid sequences specified above.

[0468] In some aspects, VH1 comprises the same CDR1, CDR2 and CDR3 regions as VH3. In some aspects, VL1 comprises the same CDR1, CDR2 and CDR3 regions as VL3. In some aspects, VH1 comprises the same CDR1, CDR2 and CDR3 regions as VH3, and VL1 comprises the same CDR1, CDR2 and CDR3 regions as VL3. In some aspects, VH2 comprises different CDR1, CDR2 and CDR3 regions than VH4 and/or VL2 comprises different CDR1, CDR2 and CDR3 regions than VL4.

[0469] In some aspects, VH1 CDR1 and VH3 CDR1 each comprise the same amino acid sequence having at least 80%, at least 85%, at least 90%, at least 91%, at least 92%, at least 93%, at least 94%, at least 95%, at least 96%, at least 97%, at least 98%, at least 99% or 100% identity to SEQ ID NO:43; VH1 CDR2 and VH3 CDR2 each comprise the same amino acid sequence having at least 80%, at least 85%, at least 90%, at least 91%, at least 92%, at least 93%, at least 94%, at least 95%, at least 96%, at least 97%, at least 98%, at least 99% or 100% identity to SEQ ID NO:44; VH1 CDR3 and VH3 CDR3 each comprise the same amino acid sequence having at least 80%, at least 85%, at least 90%, at least 91%, at least 92%, at least 93%, at least 94%, at least 95%, at least 96%, at least 97%, at least 98%, at least 99% or 100% identity to SEQ ID NO:45; VL1 CDR1 and VL3 CDR1 each comprise the same amino acid sequence having at least 80%, at least 85%, at least 90%, at least 91%, at least 92%, at least 93%, at least 94%, at least 95%, at least 96%, at least 97%, at least 98%, at least 99% or 100% identity to SEQ ID NO:39; VL1 CDR2 and VL3 CDR2 each comprise the same amino acid sequence having at least 80%, at least 85%, at least 90%, at least 91%, at least 92%, at least 93%, at least 94%, at least 95%, at least 96%, at least 97%, at least 98%, at least 99% or 100% identity to SEQ ID NO:40 (having the sequence of GAS); and VL1 CDR3 and VL3 CDR3 each comprise the same amino acid sequence having at least 80%, at least 85%, at least 90%, at least 91%, at least 92%, at least 93%, at least 94%, at least 95%, at least 96%, at least 97%, at least 98%, at least 99% or 100% identity to SEQ ID NO:41. In some aspects, VH2 CDR1 comprises an amino acid sequence having at least 80%, at least 85%, at least 90%, at least 91%, at least 92%, at least 93%, at least 94%, at least 95%, at least 96%, at least 97%, at least 98%, at least 99% or 100% identity to SEQ ID NO:67; VH2 CDR2 comprises an amino acid sequence having at least 80%, at least 85%, at least 90%, at least 91%, at least 92%, at least 93%, at least 94%, at least 95%, at least 96%, at least 97%, at least 98%, at least 99% or 100% identity to SEQ ID NO:68; VH2 CDR3 comprises an amino acid sequence having at least 80%, at least 85%, at least 90%, at least 91%, at least 92%, at least 93%, at least 94%, at least 95%, at least 96%, at least 97%, at least 98%, at least 99% or 100% identity to SEQ ID NO:68; VL2 CDR1 comprises an amino acid sequence having at least 80%, at least 85%, at least 90%, at least 91%, at least 92%, at least 93%, at least 94%, at least 95%, at least 96%, at least 97%, at least 98%, at least 99% or 100% identity to SEQ ID NO:63; VL2 CDR2 comprises an amino acid sequence having at least 80%, at least 85%, at least 90%, at least 91%, at least 92%, at least 93%, at least 94%, at least 95%, at least 96%, at least 97%, at least 98%, at least 99% or 100% identity to SEQ ID NO:64 (having the sequence of DAS); and VL2 CDR3 comprises an amino acid sequence having at least 80%, at least 85%, at least 90%, at least 91%, at least 92%, at least 93%, at least 94%, at least 95%, at least 96%, at least 97%, at least 98%, at least 99% or 100% identity to SEQ ID NO:65. In some aspects, VH4 CDR1 comprises an amino acid sequence having at least 80%, at least 85%, at least 90%, at least 91%, at least 92%, at least 93%, at least 94%, at least 95%, at least 96%, at least 97%, at least 98%, at least 99% or 100% identity to SEQ ID NO:59; VH4 CDR2 comprises an amino acid sequence having at least 80%, at least 85%, at least 90%, at least 91%, at least 92%, at least 93%, at least 94%, at least 95%, at least 96%, at least 97%, at least 98%, at least 99% or 100% identity to SEQ ID NO:60; VH4 CDR3 comprises an amino acid sequence having at least 80%, at least 85%, at least 90%, at least 91%, at least 92%, at least 93%, at least 94%, at least 95%, at least 96%, at least 97%, at least 98%, at least 99% or 100% identity to SEQ ID NO:61; VL4 CDR1 comprises an amino acid sequence having at least 80%, at least 85%, at least 90%, at least 91%, at least 92%, at least 93%, at least 94%, at least 95%, at least 96%, at least 97%, at least 98%, at least 99% or 100% identity to SEQ ID NO:55; VL4 CDR2 comprises an amino acid sequence having at least 80%, at least 85%, at least 90%, at least 91%, at least 92%, at least 93%, at least 94%, at least 95%, at least 96%, at least 97%, at least 98%, at least 99% or 100% identity to SEQ ID NO:56 (having the sequence of GTN); and VL4 CDR3 comprises an amino acid sequence having at least 80%, at least 85%, at least 90%, at least 91%, at least 92%, at least 93%, at least 94%, at least 95%, at least 96%, at least 97%, at least 98%, at least 99% or 100% identity to SEQ ID NO:57. In some preferred aspects, CDR1, CDR2 and CDR3 of VH1, VH2, VH3, VH4, VL1, VL2, VL3 and VL4 have at least 90% identity with the corresponding amino acid sequences specified above. As used herein, “at least 90% identity” includes at least 91%, 92%, 93%, 94%, 95%, 96%, 97%, 98%, 99% and 100% identity to the recited reference sequence. In some particularly preferred aspects, CDR1, CDR2 and CDR3 of VH1, VH2, VH3, VH4, VL1, VL2, VL3 and VL4 comprise or consist of the corresponding amino acid sequences specified above.

[0470] In some aspects, VH1 CDR1 and VH3 CDR1 each comprise the same amino acid sequence having at least 80%, at least 85%, at least 90%, at least 91%, at least 92%, at least 93%, at least 94%, at least 95%, at least 96%, at least 97%, at least 98%, at least 99% or 100% identity to SEQ ID NO:51; VH1 CDR2 and VH3 CDR2 each comprise the same amino acid sequence having at least 80%, at least 85%, at least 90%, at least 91%, at least 92%, at least 93%, at least 94%, at least 95%, at least 96%, at least 97%, at least 98%, at least 99% or 100% identity to SEQ ID NO:52; VH1 CDR3 and VH3 CDR3 each comprise the same amino acid sequence having at least 80%, at least 85%, at least 90%, at least 91%, at least 92%, at least 93%, at least 94%, at least 95%, at least 96%, at least 97%, at least 98%, at least 99% or 100% identity to SEQ ID NO:53; VL1 CDR1 and VL3 CDR1 each comprise the same amino acid sequence having at least 80%, at least 85%, at least 90%, at least 91%, at least 92%, at least 93%, at least 94%, at least 95%, at least 96%, at least 97%, at least 98%, at least 99% or 100% identity to SEQ ID NO:47; VL1 CDR2 and VL3 CDR2 each comprise the same amino acid sequence having at least 80%, at least 85%, at least 90%, at least 91%, at least 92%, at least 93%, at least 94%, at least 95%, at least 96%, at least 97%, at least 98%, at least 99% or 100% identity to SEQ ID NO:48 (having the sequence of GAS); and VL1 CDR3 and VL3 CDR3 each comprise the same amino acid sequence having at least 80%, at least 85%, at least 90%, at least 91%, at least 92%, at least 93%, at least 94%, at least 95%, at least 96%, at least 97%, at least 98%, at least 99% or 100% identity to SEQ ID NO:49. In some aspects, VH2 CDR1 comprises an amino acid sequence having at least 80%, at least 85%, at least 90%, at least 91%, at least 92%, at least 93%, at least 94%, at least 95%, at least 96%, at least 97%, at least 98%, at least 99% or 100% identity to SEQ ID NO:59; VH2 CDR2 comprises an amino acid sequence having at least 80%, at least 85%, at least 90%, at least 91%, at least 92%, at least 93%, at least 94%, at least 95%, at least 96%, at least 97%, at least 98%, at least 99% or 100% identity to SEQ ID NO:60; VH2 CDR3 comprises an amino acid sequence having at least 80%, at least 85%, at least 90%, at least 91%, at least 92%, at least 93%, at least 94%, at least 95%, at least 96%, at least 97%, at least 98%, at least 99% or 100% identity to SEQ ID NO:61; VL2 CDR1 comprises an amino acid sequence having at least 80%, at least 85%, at least 90%, at least 91%, at least 92%, at least 93%, at least 94%, at least 95%, at least 96%, at least 97%, at least 98%, at least 99% or 100% identity to SEQ ID NO:55; VL2 CDR2 comprises an amino acid sequence having at least 80%, at least 85%, at least 90%, at least 91%, at least 92%, at least 93%, at least 94%, at least 95%, at least 96%, at least 97%, at least 98%, at least 99% or 100% identity to SEQ ID NO:56 (having the sequence of GTN); and VL2 CDR3 comprises an amino acid sequence having at least 80%, at least 85%, at least 90%, at least 91%, at least 92%, at least 93%, at least 94%, at least 95%, at least 96%, at least 97%, at least 98%, at least 99% or 100% identity to SEQ ID NO:57. In some aspects, VH4 CDR1 comprises an amino acid sequence having at least 80%, at least 85%, at least 90%, at least 91%, at least 92%, at least 93%, at least 94%, at least 95%, at least 96%, at least 97%, at least 98%, at least 99% or 100% identity to SEQ ID NO:67; VH4 CDR2 comprises an amino acid sequence having at least 80%, at least 85%, at least 90%, at least 91%, at least 92%, at least 93%, at least 94%, at least 95%, at least 96%, at least 97%, at least 98%, at least 99% or 100% identity to SEQ ID NO:68; VH4 CDR3 comprises an amino acid sequence having at least 80%, at least 85%, at least 90%, at least 91%, at least 92%, at least 93%, at least 94%, at least 95%, at least 96%, at least 97%, at least 98%, at least 99% or 100% identity to SEQ ID NO:69; VL4 CDR1 comprises an amino acid sequence having at least 80%, at least 85%, at least 90%, at least 91%, at least 92%, at least 93%, at least 94%, at least 95%, at least 96%, at least 97%, at least 98%, at least 99% or 100% identity to SEQ ID NO:63; VL4 CDR2 comprises an amino acid sequence having at least 80%, at least 85%, at least 90%, at least 91%, at least 92%, at least 93%, at least 94%, at least 95%, at least 96%, at least 97%, at least 98%, at least 99% or 100% identity to SEQ ID NO:64 (having the sequence of DAS); and VL4 CDR3 comprises an amino acid sequence having at least 80%, at least 85%, at least 90%, at least 91%, at least 92%, at least 93%, at least 94%, at least 95%, at least 96%, at least 97%, at least 98%, at least 99% or 100% identity to SEQ ID NO:65. In some preferred aspects, CDR1, CDR2 and CDR3 of VH1, VH2, VH3, VH4, VL1, VL2, VL3 and VL4 have at least 90% identity with the corresponding amino acid sequences specified above. As used herein, “at least 90% identity” includes at least 91%, 92%, 93%, 94%, 95%, 96%, 97%, 98%, 99% and 100% identity to the recited reference sequence. In some particularly preferred aspects, CDR1, CDR2 and CDR3 of VH1, VH2, VH3, VH4, VL1, VL2, VL3 and VL4 comprise or consist of the corresponding amino acid sequences specified above.

[0471] In some aspects, VH2 comprises the same heavy chain variable region as VH4. In some aspects, VL2 comprises the same light chain variable region as VL4. In some aspects, VH2 comprises the same heavy chain variable region as VH4, and VL2 comprises the same light chain variable region as VL4. In some aspects, VH2 and VH4 each comprise an amino acid sequence having at least 80%, at least 85%, at least 90%, at least 91%, at least 92%, at least 93%, at least 94%, at least 95%, at least 96%, at least 97%, at least 98%, at least 99% or 100% identity to any one of SEQ ID NOs:42, 50, 58, 58, 66, 74, 170, 178, 186, 263, 271, 279, 287, 510, 512, 520, 528, 536, 544, 552, 560, 568, 576, 584, 592, 600, 608, 616, 624, 626, 628, 630, 632, 634, 636, 638, 646, 654, 663, 779, 781, 785 and 787, and/or VL2 and VL4 each comprise an amino acid sequence having at least 80%, at least 85%, at least 90%, at least 91%, at least 92%, at least 93%, at least 94%, at least 95%, at least 96%, at least 97%, at least 98%, at least 99% or 100% identity to any one of SEQ ID NOs:38, 46, 54, 62, 70, 166, 174, 182, 259, 267, 275, 283, 508, 509, 511, 516, 524, 532, 540, 548, 556, 564, 572, 580, 588, 596, 604, 612, 620, 625, 627, 629, 631, 633, 635, 637, 642, 650, 659 and 667. In some aspects, VH1 and VH3 comprise different heavy chain variable regions than VH2 and VH4 (e.g., an amino acid sequence having at least 80%, at least 85%, at least 90%, at least 91%, at least 92%, at least 93%, at least 94%, at least 95%, at least 96%, at least 97%, at least 98%, at least 99% or 100% identity to any one of SEQ ID NOs:42, 50, 58, 58, 66, 74, 170, 178, 186, 263, 271, 279, 287, 510, 512, 520, 528, 536, 544, 552, 560, 568, 576, 584, 592, 600, 608, 616, 624, 626, 628, 630, 632, 634, 636, 638, 646, 654, 663, 779, 781, 785 and 787), and/or VL1 and VL3 comprise different light chain variable regions than VL2 and VL4 (e.g., an amino acid sequence having at least 80%, at least 85%, at least 90%, at least 91%, at least 92%, at least 93%, at least 94%, at least 95%, at least 96%, at least 97%, at least 98%, at least 99% or 100% identity to any one of SEQ ID NOs:38, 46, 54, 62, 70, 166, 174, 182, 259, 267, 275, 283, 508, 509, 511, 516, 524, 532, 540, 548, 556, 564, 572, 580, 588, 596, 604, 612, 620, 625, 627, 629, 631, 633, 635, 637, 642, 650, 659 and 667). In some aspects, VH1 comprises a different heavy chain variable region than VH3, and/or VL1 comprises a different light chain variable region than VL3. In some aspects, the sequence has a mutation at N62, for example, N62Q or N62Q at, for example, SEQ ID NO:279. In some preferred aspects, VH1, VH2, VH3, VH4, VL1, VL2, VL3 and VL4 have at least 90% identity with the corresponding amino acid sequences specified above, optionally with a mutation at N62 as described above. As used herein, “at least 90% identity” includes at least 91%, 92%, 93%, 94%, 95%, 96%, 97%, 98%, 99% and 100% identity to the recited reference sequence. In some particularly preferred aspects, VH1, VH2, VH3, VH4, VL1, VL2, VL3 and VL4 comprise or consist of the corresponding amino acid sequences specified above, optionally with a mutation at N62 as described above.

[0472] In some aspects, VH2 and VH4 each comprise an amino acid sequence having at least 80%, at least 85%, at least 90%, at least 91%, at least 92%, at least 93%, at least 94%, at least 95%, at least 96%, at least 97%, at least 98%, at least 99% or 100% identity to SEQ ID NO:42. In some aspects, VL2 and VL4 each comprise an amino acid sequence having at least 80%, at least 85%, at least 90%, at least 91%, at least 92%, at least 93%, at least 94%, at least 95%, at least 96%, at least 97%, at least 98%, at least 99% or 100% identity to SEQ ID NO:38. In some aspects, VH2 and VH4 each comprise an amino acid sequence having at least 80%, at least 85%, at least 90%, at least 91%, at least 92%, at least 93%, at least 94%, at least 95%, at least 96%, at least 97%, at least 98%, at least 99% or 100% identity to SEQ ID NO:42, and VL2 and VL4 each comprise an amino acid sequence having at least 80%, at least 85%, at least 90%, at least 91%, at least 92%, at least 93%, at least 94%, at least 95%, at least 96%, at least 97%, at least 98%, at least 99% or 100% identity to SEQ ID NO:38. In some aspects, VH1 comprises an amino acid sequence having at least 80%, at least 85%, at least 90%, at least 91%, at least 92%, at least 93%, at least 94%, at least 95%, at least 96%, at least 97%, at least 98%, at least 99% or 100% identity to SEQ ID NO:66, and/or VL1 comprises an amino acid sequence having at least 80%, at least 85%, at least 90%, at least 91%, at least 92%, at least 93%, at least 94%, at least 95%, at least 96%, at least 97%, at least 98%, at least 99% or 100% identity to SEQ ID NO:62. In some aspects, VH3 comprises an amino acid sequence having at least 80%, at least 85%, at least 90%, at least 91%, at least 92%, at least 93%, at least 94%, at least 95%, at least 96%, at least 97%, at least 98%, at least 99% or 100% identity to SEQ ID NO:58, and/or VL3 comprises an amino acid sequence having at least 80%, at least 85%, at least 90%, at least 91%, at least 92%, at least 93%, at least 94%, at least 95%, at least 96%, at least 97%, at least 98%, at least 99% or 100% identity to SEQ ID NO:54. In some preferred aspects, VH1, VH2, VH3, VH4, VL1, VL2, VL3 and VL4 have at least 90% identity with the corresponding amino acid sequences specified above. As used herein, “at least 90% identity” includes at least 91%, 92%, 93%, 94%, 95%, 96%, 97%, 98%, 99% and 100% identity to the recited reference sequence. In some particularly preferred aspects, VH1, VH2, VH3, VH4, VL1, VL2, VL3 and VL4 comprise or consist of the corresponding amino acid sequences specified above.

[0473] In some aspects, VH2 and VH4 each comprise an amino acid sequence having at least 80%, at least 85%, at least 90%, at least 91%, at least 92%, at least 93%, at least 94%, at least 95%, at least 96%, at least 97%, at least 98%, at least 99% or 100% identity to SEQ ID NO:50. In some aspects, VL2 and VL4 each comprise an amino acid sequence having at least 80%, at least 85%, at least 90%, at least 91%, at least 92%, at least 93%, at least 94%, at least 95%, at least 96%, at least 97%, at least 98%, at least 99% or 100% identity to SEQ ID NO:46. In some aspects, VH2 and VH4 each comprise an amino acid sequence having at least 80%, at least 85%, at least 90%, at least 91%, at least 92%, at least 93%, at least 94%, at least 95%, at least 96%, at least 97%, at least 98%, at least 99% or 100% identity to SEQ ID NO:50, and VL2 and VL4 each comprise an amino acid sequence having at least 80%, at least 85%, at least 90%, at least 91%, at least 92%, at least 93%, at least 94%, at least 95%, at least 96%, at least 97%, at least 98%, at least 99% or 100% identity to SEQ ID NO:46. In some aspects, VH1 comprises an amino acid sequence having at least 80%, at least 85%, at least 90%, at least 91%, at least 92%, at least 93%, at least 94%, at least 95%, at least 96%, at least 97%, at least 98%, at least 99% or 100% identity to SEQ ID NO:58, and/or VL1 comprises an amino acid sequence having at least 80%, at least 85%, at least 90%, at least 91%, at least 92%, at least 93%, at least 94%, at least 95%, at least 96%, at least 97%, at least 98%, at least 99% or 100% identity to SEQ ID NO:54. In some aspects, VH3 comprises an amino acid sequence having at least 80%, at least 85%, at least 90%, at least 91%, at least 92%, at least 93%, at least 94%, at least 95%, at least 96%, at least 97%, at least 98%, at least 99% or 100% identity to SEQ ID NO:66, and/or VL3 comprises an amino acid sequence having at least 80%, at least 85%, at least 90%, at least 91%, at least 92%, at least 93%, at least 94%, at least 95%, at least 96%, at least 97%, at least 98%, at least 99% or 100% identity to SEQ ID NO:62. In some preferred aspects, VH1, VH2, VH3, VH4, VL1, VL2, VL3 and VL4 have at least 90% identity with the corresponding amino acid sequences specified above. As used herein, “at least 90% identity” includes at least 91%, 92%, 93%, 94%, 95%, 96%, 97%, 98%, 99% and 100% identity to the recited reference sequence. In some particularly preferred aspects, VH1, VH2, VH3, VH4, VL1, VL2, VL3 and VL4 comprise or consist of the corresponding amino acid sequences specified above.

[0474] In some aspects, VH2 comprises the same heavy chain variable region as VH3. In some aspects, VL2 comprises the same light chain variable region as VL3. In some aspects, VH2 comprises the same heavy chain variable region as VH3, and VL2 comprises the same light chain variable region as VL3. In some aspects, VH2 and VH3 each comprise an amino acid sequence having at least 80%, at least 85%, at least 90%, at least 91%, at least 92%, at least 93%, at least 94%, at least 95%, at least 96%, at least 97%, at least 98%, at least 99% or 100% identity to any one of SEQ ID NOs:42, 50, 58, 58, 66, 74, 170, 178, 186, 263, 271, 279, 287, 510, 512, 520, 528, 536, 544, 552, 560, 568, 576, 584, 592, 600, 608, 616, 624, 626, 628, 630, 632, 634, 636, 638, 646, 654, 663, 779, 781, 785 and 787, and/or VL2 and VL3 each comprise an amino acid sequence having at least 80%, at least 85%, at least 90%, at least 91%, at least 92%, at least 93%, at least 94%, at least 95%, at least 96%, at least 97%, at least 98%, at least 99% or 100% identity to any one of SEQ ID NOs:38, 46, 54, 62, 70, 166, 174, 182, 259, 267, 275, 283, 508, 509, 511, 516, 524, 532, 540, 548, 556, 564, 572, 580, 588, 596, 604, 612, 620, 625, 627, 629, 631, 633, 635, 637, 642, 650, 659 and 667. In some aspects, VH1 and VH4 comprise different heavy chain variable regions than VH2 and VH3 (e.g., an amino acid sequence having at least 80%, at least 85%, at least 90%, at least 91%, at least 92%, at least 93%, at least 94%, at least 95%, at least 96%, at least 97%, at least 98%, at least 99% or 100% identity to any one of SEQ ID NOs:42, 50, 58, 58, 66, 74, 170, 178, 186, 263, 271, 279, 287, 510, 512, 520, 528, 536, 544, 552, 560, 568, 576, 584, 592, 600, 608, 616, 624, 626, 628, 630, 632, 634, 636, 638, 646, 654, 663, 779, 781, 785 and 787), and/or VL1 and VL4 comprise different light chain variable regions than VL2 and VL3 (e.g., an amino acid sequence having at least 80%, at least 85%, at least 90%, at least 91%, at least 92%, at least 93%, at least 94%, at least 95%, at least 96%, at least 97%, at least 98%, at least 99% or 100% identity to any one of SEQ ID NOs:38, 46, 54, 62, 70, 166, 174, 182, 259, 267, 275, 283, 508, 509, 511, 516, 524, 532, 540, 548, 556, 564, 572, 580, 588, 596, 604, 612, 620, 625, 627, 629, 631, 633, 635, 637, 642, 650, 659 and 667). In some aspects, VH1 comprises a different heavy chain variable region than VH4, and/or VL1 comprises a different light chain variable region than VL4. In some aspects, the sequence has a mutation at N62, for example, N62Q or N62Q at, for example, SEQ ID NO:279. In some preferred aspects, VH1, VH2, VH3, VH4, VL1, VL2, VL3 and VL4 have at least 90% identity with the corresponding amino acid sequences specified above, optionally with a mutation at N62 as described above. As used herein, “at least 90% identity” includes at least 91%, 92%, 93%, 94%, 95%, 96%, 97%, 98%, 99% and 100% identity to the recited reference sequence. In some particularly preferred aspects, VH1, VH2, VH3, VH4, VL1, VL2, VL3 and VL4 comprise or consist of the corresponding amino acid sequences specified above, optionally with a mutation at N62 as described above.

[0475] In some aspects, VH2 and VH3 each comprise an amino acid sequence having at least 80%, at least 85%, at least 90%, at least 91%, at least 92%, at least 93%, at least 94%, at least 95%, at least 96%, at least 97%, at least 98%, at least 99% or 100% identity to SEQ ID NO:42. In some aspects, VL2 and VL3 each comprise an amino acid sequence having at least 80%, at least 85%, at least 90%, at least 91%, at least 92%, at least 93%, at least 94%, at least 95%, at least 96%, at least 97%, at least 98%, at least 99% or 100% identity to SEQ ID NO:38. In some aspects, VH2 and VH3 each comprise an amino acid sequence having at least 80%, at least 85%, at least 90%, at least 91%, at least 92%, at least 93%, at least 94%, at least 95%, at least 96%, at least 97%, at least 98%, at least 99% or 100% identity to SEQ ID NO:42, and VL2 and VL3 each comprise an amino acid sequence having at least 80%, at least 85%, at least 90%, at least 91%, at least 92%, at least 93%, at least 94%, at least 95%, at least 96%, at least 97%, at least 98%, at least 99% or 100% identity to SEQ ID NO:38. In some aspects, VH1 comprises an amino acid sequence having at least 80%, at least 85%, at least 90%, at least 91%, at least 92%, at least 93%, at least 94%, at least 95%, at least 96%, at least 97%, at least 98%, at least 99% or 100% identity to SEQ ID NO:66, and/or VL1 comprises an amino acid sequence having at least 80%, at least 85%, at least 90%, at least 91%, at least 92%, at least 93%, at least 94%, at least 95%, at least 96%, at least 97%, at least 98%, at least 99% or 100% identity to SEQ ID NO:62. In some aspects, VH4 comprises an amino acid sequence having at least 80%, at least 85%, at least 90%, at least 91%, at least 92%, at least 93%, at least 94%, at least 95%, at least 96%, at least 97%, at least 98%, at least 99% or 100% identity to SEQ ID NO:58, and/or VL4 comprises an amino acid sequence having at least 80%, at least 85%, at least 90%, at least 91%, at least 92%, at least 93%, at least 94%, at least 95%, at least 96%, at least 97%, at least 98%, at least 99% or 100% identity to SEQ ID NO:54. In some preferred aspects, VH1, VH2, VH3, VH4, VL1, VL2, VL3 and VL4 have at least 90% identity with the corresponding amino acid sequences specified above. As used herein, “at least 90% identity” includes at least 91%, 92%, 93%, 94%, 95%, 96%, 97%, 98%, 99% and 100% identity to the recited reference sequence. In some particularly preferred aspects, VH1, VH2, VH3, VH4, VL1, VL2, VL3 and VL4 comprise or consist of the corresponding amino acid sequences specified above.

[0476] In some aspects, VH2 and VH3 each comprise an amino acid sequence having at least 80%, at least 85%, at least 90%, at least 91%, at least 92%, at least 93%, at least 94%, at least 95%, at least 96%, at least 97%, at least 98%, at least 99% or 100% identity to SEQ ID NO:50. In some aspects, VL2 and VL3 each comprise an amino acid sequence having at least 80%, at least 85%, at least 90%, at least 91%, at least 92%, at least 93%, at least 94%, at least 95%, at least 96%, at least 97%, at least 98%, at least 99% or 100% identity to SEQ ID NO:46. In some aspects, VH2 and VH3 each comprise an amino acid sequence having at least 80%, at least 85%, at least 90%, at least 91%, at least 92%, at least 93%, at least 94%, at least 95%, at least 96%, at least 97%, at least 98%, at least 99% or 100% identity to SEQ ID NO:50, and VL2 and VL3 each comprise an amino acid sequence having at least 80%, at least 85%, at least 90%, at least 91%, at least 92%, at least 93%, at least 94%, at least 95%, at least 96%, at least 97%, at least 98%, at least 99% or 100% identity to SEQ ID NO:46. In some aspects, VH1 comprises an amino acid sequence having at least 80%, at least 85%, at least 90%, at least 91%, at least 92%, at least 93%, at least 94%, at least 95%, at least 96%, at least 97%, at least 98%, at least 99% or 100% identity to SEQ ID NO:58, and/or VL1 comprises an amino acid sequence having at least 80%, at least 85%, at least 90%, at least 91%, at least 92%, at least 93%, at least 94%, at least 95%, at least 96%, at least 97%, at least 98%, at least 99% or 100% identity to SEQ ID NO:54. In some aspects, VH4 comprises an amino acid sequence having at least 80%, at least 85%, at least 90%, at least 91%, at least 92%, at least 93%, at least 94%, at least 95%, at least 96%, at least 97%, at least 98%, at least 99% or 100% identity to SEQ ID NO:66, and/or VL4 comprises an amino acid sequence having at least 80%, at least 85%, at least 90%, at least 91%, at least 92%, at least 93%, at least 94%, at least 95%, at least 96%, at least 97%, at least 98%, at least 99% or 100% identity to SEQ ID NO:62. In some preferred aspects, VH1, VH2, VH3, VH4, VL1, VL2, VL3 and VL4 have at least 90% identity with the corresponding amino acid sequences specified above. As used herein, “at least 90% identity” includes at least 91%, 92%, 93%, 94%, 95%, 96%, 97%, 98%, 99% and 100% identity to the recited reference sequence. In some particularly preferred aspects, VH1, VH2, VH3, VH4, VL1, VL2, VL3 and VL4 comprise or consist of the corresponding amino acid sequences specified above.

[0477] In some aspects, VH1 comprises the same heavy chain variable region as VH4. In some aspects, VL1 comprises the same light chain variable region as VL4. In some aspects, VH1 comprises the same heavy chain variable region as VH4, and VL1 comprises the same light chain variable region as VL4. In some aspects, VH1 and VH4 each comprise an amino acid sequence having at least 80%, at least 85%, at least 90%, at least 91%, at least 92%, at least 93%, at least 94%, at least 95%, at least 96%, at least 97%, at least 98%, at least 99% or 100% identity to any one of SEQ ID NOs:42, 50, 58, 58, 66, 74, 170, 178, 186, 263, 271, 279, 287, 510, 512, 520, 528, 536, 544, 552, 560, 568, 576, 584, 592, 600, 608, 616, 624, 626, 628, 630, 632, 634, 636, 638, 646, 654, 663, 779, 781, 785 and 787, and/or VL1 and VL4 each comprise an amino acid sequence having at least 80%, at least 85%, at least 90%, at least 91%, at least 92%, at least 93%, at least 94%, at least 95%, at least 96%, at least 97%, at least 98%, at least 99% or 100% identity to any one of SEQ ID NOs:38, 46, 54, 62, 70, 166, 174, 182, 259, 267, 275, 283, 508, 509, 511, 516, 524, 532, 540, 548, 556, 564, 572, 580, 588, 596, 604, 612, 620, 625, 627, 629, 631, 633, 635, 637, 642, 650, 659 and 667. In some aspects, VH2 and VH3 comprise different heavy chain variable regions than VH1 and VH4 (e.g., an amino acid sequence having at least 80%, at least 85%, at least 90%, at least 91%, at least 92%, at least 93%, at least 94%, at least 95%, at least 96%, at least 97%, at least 98%, at least 99% or 100% identity to any one of SEQ ID NOs:42, 50, 58, 58, 66, 74, 170, 178, 186, 263, 271, 279, 287, 510, 512, 520, 528, 536, 544, 552, 560, 568, 576, 584, 592, 600, 608, 616, 624, 626, 628, 630, 632, 634, 636, 638, 646, 654, 663, 779, 781, 785 and 787, and/or VL2 and VL3 comprise different light chain variable regions than VL1 and VL4 (e.g., an amino acid sequence having at least 80%, at least 85%, at least 90%, at least 91%, at least 92%, at least 93%, at least 94%, at least 95%, at least 96%, at least 97%, at least 98%, at least 99% or 100% identity to any one of SEQ ID NOs:38, 46, 54, 62, 70, 166, 174, 182, 259, 267, 275, 283, 508, 509, 511, 516, 524, 532, 540, 548, 556, 564, 572, 580, 588, 596, 604, 612, 620, 625, 627, 629, 631, 633, 635, 637, 642, 650, 659 and 667). In some aspects, VH2 comprises a different heavy chain variable region than VH3, and/or VL2 comprises a different light chain variable region than VL3. In some aspects, the sequence has a mutation at N62, for example, N62Q or N62Q at, for example, SEQ ID NO:279. In some preferred aspects, VH1, VH2, VH3, VH4, VL1, VL2, VL3 and VL4 have at least 90% identity with the corresponding amino acid sequences specified above, optionally with a mutation at N62 as described above. As used herein, “at least 90% identity” includes at least 91%, 92%, 93%, 94%, 95%, 96%, 97%, 98%, 99% and 100% identity to the recited reference sequence. In some particularly preferred aspects, VH1, VH2, VH3, VH4, VL1, VL2, VL3 and VL4 comprise or consist of the corresponding amino acid sequences specified above, optionally with a mutation at N62 as described above.

[0478] In some aspects, VH1 and VH4 each comprise an amino acid sequence having at least 80%, at least 85%, at least 90%, at least 91%, at least 92%, at least 93%, at least 94%, at least 95%, at least 96%, at least 97%, at least 98%, at least 99% or 100% identity to SEQ ID NO:42. In some aspects, VL1 and VL4 each comprise an amino acid sequence having at least 80%, at least 85%, at least 90%, at least 91%, at least 92%, at least 93%, at least 94%, at least 95%, at least 96%, at least 97%, at least 98%, at least 99% or 100% identity to SEQ ID NO:38. In some aspects, VH1 and VH4 each comprise an amino acid sequence having at least 80%, at least 85%, at least 90%, at least 91%, at least 92%, at least 93%, at least 94%, at least 95%, at least 96%, at least 97%, at least 98%, at least 99% or 100% identity to SEQ ID NO:42, and VL1 and VL4 each comprise an amino acid sequence having at least 80%, at least 85%, at least 90%, at least 91%, at least 92%, at least 93%, at least 94%, at least 95%, at least 96%, at least 97%, at least 98%, at least 99% or 100% identity to SEQ ID NO:38. In some aspects, VH2 comprises an amino acid sequence having at least 80%, at least 85%, at least 90%, at least 91%, at least 92%, at least 93%, at least 94%, at least 95%, at least 96%, at least 97%, at least 98%, at least 99% or 100% identity to SEQ ID NO:66, and/or VL2 comprises an amino acid sequence having at least 80%, at least 85%, at least 90%, at least 91%, at least 92%, at least 93%, at least 94%, at least 95%, at least 96%, at least 97%, at least 98%, at least 99% or 100% identity to SEQ ID NO:62. In some aspects, VH3 comprises an amino acid sequence having at least 80%, at least 85%, at least 90%, at least 91%, at least 92%, at least 93%, at least 94%, at least 95%, at least 96%, at least 97%, at least 98%, at least 99% or 100% identity to SEQ ID NO:58, and/or VL3 comprises an amino acid sequence having at least 80%, at least 85%, at least 90%, at least 91%, at least 92%, at least 93%, at least 94%, at least 95%, at least 96%, at least 97%, at least 98%, at least 99% or 100% identity to SEQ ID NO:54. In some preferred aspects, VH1, VH2, VH3, VH4, VL1, VL2, VL3 and VL4 have at least 90% identity with the corresponding amino acid sequences specified above. As used herein, “at least 90% identity” includes at least 91%, 92%, 93%, 94%, 95%, 96%, 97%, 98%, 99% and 100% identity to the recited reference sequence. In some particularly preferred aspects, VH1, VH2, VH3, VH4, VL1, VL2, VL3 and VL4 comprise or consist of the corresponding amino acid sequences specified above.

[0479] In some aspects, VH1 and VH4 each comprise an amino acid sequence having at least 80%, at least 85%, at least 90%, at least 91%, at least 92%, at least 93%, at least 94%, at least 95%, at least 96%, at least 97%, at least 98%, at least 99% or 100% identity to SEQ ID NO:50. In some aspects, VL1 and VL4 each comprise an amino acid sequence having at least 80%, at least 85%, at least 90%, at least 91%, at least 92%, at least 93%, at least 94%, at least 95%, at least 96%, at least 97%, at least 98%, at least 99% or 100% identity to SEQ ID NO:46. In some aspects, VH1 and VH4 each comprise an amino acid sequence having at least 80%, at least 85%, at least 90%, at least 91%, at least 92%, at least 93%, at least 94%, at least 95%, at least 96%, at least 97%, at least 98%, at least 99% or 100% identity to SEQ ID NO:50, and VL1 and VL4 each comprise an amino acid sequence having at least 80%, at least 85%, at least 90%, at least 91%, at least 92%, at least 93%, at least 94%, at least 95%, at least 96%, at least 97%, at least 98%, at least 99% or 100% identity to SEQ ID NO:46. In some aspects, VH2 comprises an amino acid sequence having at least 80%, at least 85%, at least 90%, at least 91%, at least 92%, at least 93%, at least 94%, at least 95%, at least 96%, at least 97%, at least 98%, at least 99% or 100% identity to SEQ ID NO:58, and/or VL2 comprises an amino acid sequence having at least 80%, at least 85%, at least 90%, at least 91%, at least 92%, at least 93%, at least 94%, at least 95%, at least 96%, at least 97%, at least 98%, at least 99% or 100% identity to SEQ ID NO:54. In some aspects, VH3 comprises an amino acid sequence having at least 80%, at least 85%, at least 90%, at least 91%, at least 92%, at least 93%, at least 94%, at least 95%, at least 96%, at least 97%, at least 98%, at least 99% or 100% identity to SEQ ID NO:66, and/or VL3 comprises an amino acid sequence having at least 80%, at least 85%, at least 90%, at least 91%, at least 92%, at least 93%, at least 94%, at least 95%, at least 96%, at least 97%, at least 98%, at least 99% or 100% identity to SEQ ID NO:62. In some preferred aspects, VH1, VH2, VH3, VH4, VL1, VL2, VL3 and VL4 have at least 90% identity with the corresponding amino acid sequences specified above. As used herein, “at least 90% identity” includes at least 91%, 92%, 93%, 94%, 95%, 96%, 97%, 98%, 99% and 100% identity to the recited reference sequence. In some particularly preferred aspects, VH1, VH2, VH3, VH4, VL1, VL2, VL3 and VL4 comprise or consist of the corresponding amino acid sequences specified above.

[0480] In some aspects, VH1 comprises the same heavy chain variable region as VH3. In some aspects, VL1 comprises the same light chain variable region as VL3. In some aspects, VH1 comprises the same heavy chain variable region as VH3, and VL1 comprises the same light chain variable region as VL3. In some aspects, VH1 and VH3 each comprise an amino acid sequence having at least 80%, at least 85%, at least 90%, at least 91%, at least 92%, at least 93%, at least 94%, at least 95%, at least 96%, at least 97%, at least 98%, at least 99% or 100% identity to any one of SEQ ID NOs:42, 50, 58, 58, 66, 74, 170, 178, 186, 263, 271, 279, 287, 510, 512, 520, 528, 536, 544, 552, 560, 568, 576, 584, 592, 600, 608, 616, 624, 626, 628, 630, 632, 634, 636, 638, 646, 654, 663, 779, 781, 785 and 787, and/or VL1 and VL3 each comprise an amino acid sequence having at least 80%, at least 85%, at least 90%, at least 91%, at least 92%, at least 93%, at least 94%, at least 95%, at least 96%, at least 97%, at least 98%, at least 99% or 100% identity to any one of SEQ ID NOs:38, 46, 54, 62, 70, 166, 174, 182, 259, 267, 275, 283, 508, 509, 511, 516, 524, 532, 540, 548, 556, 564, 572, 580, 588, 596, 604, 612, 620, 625, 627, 629, 631, 633, 635, 637, 642, 650, 659 and 667. In some aspects, VH2 and VH4 comprise different heavy chain variable regions than VH1 and VH3 (e.g., an amino acid sequence having at least 80%, at least 85%, at least 90%, at least 91%, at least 92%, at least 93%, at least 94%, at least 95%, at least 96%, at least 97%, at least 98%, at least 99% or 100% identity to any one of SEQ ID NOs:42, 50, 58, 58, 66, 74, 170, 178, 186, 263, 271, 279, 287, 510, 512, 520, 528, 536, 544, 552, 560, 568, 576, 584, 592, 600, 608, 616, 624, 626, 628, 630, 632, 634, 636, 638, 646, 654, 663, 779, 781, 785 and 787), and/or VL2 and VL4 comprise different light chain variable regions than VL1 and VL3 (e.g., an amino acid sequence having at least 80%, at least 85%, at least 90%, at least 91%, at least 92%, at least 93%, at least 94%, at least 95%, at least 96%, at least 97%, at least 98%, at least 99% or 100% identity to any one of SEQ ID NOs:38, 46, 54, 62, 70, 166, 174, 182, 259, 267, 275, 283, 508, 509, 511, 516, 524, 532, 540, 548, 556, 564, 572, 580, 588, 596, 604, 612, 620, 625, 627, 629, 631, 633, 635, 637, 642, 650, 659 and 667). In some aspects, VH2 comprises a different heavy chain variable region than VH4, and/or VL2 comprises a different light chain variable region than VL4. In some aspects, the sequence has a mutation at N62, for example, N62Q or N62Q at, for example, SEQ ID NO:279. In some preferred aspects, VH1, VH2, VH3, VH4, VL1, VL2, VL3 and VL4 have at least 90% identity with the corresponding amino acid sequences specified above, optionally with a mutation at N62 as described above. As used herein, “at least 90% identity” includes at least 91%, 92%, 93%, 94%, 95%, 96%, 97%, 98%, 99% and 100% identity to the recited reference sequence. In some particularly preferred aspects, VH1, VH2, VH3, VH4, VL1, VL2, VL3 and VL4 comprise or consist of the corresponding amino acid sequences specified above, optionally with a mutation at N62 as described above.

[0481] In some aspects, VH1 and VH3 each comprise an amino acid sequence having at least 80%, at least 85%, at least 90%, at least 91%, at least 92%, at least 93%, at least 94%, at least 95%, at least 96%, at least 97%, at least 98%, at least 99% or 100% identity to SEQ ID NO:42. In some aspects, VL1 and VL3 each comprise an amino acid sequence having at least 80%, at least 85%, at least 90%, at least 91%, at least 92%, at least 93%, at least 94%, at least 95%, at least 96%, at least 97%, at least 98%, at least 99% or 100% identity to SEQ ID NO:38. In some aspects, VH1 and VH3 each comprise an amino acid sequence having at least 80%, at least 85%, at least 90%, at least 91%, at least 92%, at least 93%, at least 94%, at least 95%, at least 96%, at least 97%, at least 98%, at least 99% or 100% identity to SEQ ID NO:42, and VL1 and VL3 each comprise an amino acid sequence having at least 80%, at least 85%, at least 90%, at least 91%, at least 92%, at least 93%, at least 94%, at least 95%, at least 96%, at least 97%, at least 98%, at least 99% or 100% identity to SEQ ID NO:38. In some aspects, VH2 comprises an amino acid sequence having at least 80%, at least 85%, at least 90%, at least 91%, at least 92%, at least 93%, at least 94%, at least 95%, at least 96%, at least 97%, at least 98%, at least 99% or 100% identity to SEQ ID NO:66, and/or VL2 comprises an amino acid sequence having at least 80%, at least 85%, at least 90%, at least 91%, at least 92%, at least 93%, at least 94%, at least 95%, at least 96%, at least 97%, at least 98%, at least 99% or 100% identity to SEQ ID NO:62. In some aspects, VH4 comprises an amino acid sequence having at least 80%, at least 85%, at least 90%, at least 91%, at least 92%, at least 93%, at least 94%, at least 95%, at least 96%, at least 97%, at least 98%, at least 99% or 100% identity to SEQ ID NO:58, and/or VL4 comprises an amino acid sequence having at least 80%, at least 85%, at least 90%, at least 91%, at least 92%, at least 93%, at least 94%, at least 95%, at least 96%, at least 97%, at least 98%, at least 99% or 100% identity to SEQ ID NO:54. In some preferred aspects, VH1, VH2, VH3, VH4, VL1, VL2, VL3 and VL4 have at least 90% identity with the corresponding amino acid sequences specified above. As used herein, “at least 90% identity” includes at least 91%, 92%, 93%, 94%, 95%, 96%, 97%, 98%, 99% and 100% identity to the recited reference sequence. In some particularly preferred aspects, VH1, VH2, VH3, VH4, VL1, VL2, VL3 and VL4 comprise or consist of the corresponding amino acid sequences specified above.

[0482] In some aspects, VH1 and VH3 each comprise an amino acid sequence having at least 80%, at least 85%, at least 90%, at least 91%, at least 92%, at least 93%, at least 94%, at least 95%, at least 96%, at least 97%, at least 98%, at least 99% or 100% identity to SEQ ID NO:50. In some aspects, VL1 and VL3 each comprise an amino acid sequence having at least 80%, at least 85%, at least 90%, at least 91%, at least 92%, at least 93%, at least 94%, at least 95%, at least 96%, at least 97%, at least 98%, at least 99% or 100% identity to SEQ ID NO:46. In some aspects, VH1 and VH3 each comprise an amino acid sequence having at least 80%, at least 85%, at least 90%, at least 91%, at least 92%, at least 93%, at least 94%, at least 95%, at least 96%, at least 97%, at least 98%, at least 99% or 100% identity to SEQ ID NO:50, and VL1 and VL3 each comprise an amino acid sequence having at least 80%, at least 85%, at least 90%, at least 91%, at least 92%, at least 93%, at least 94%, at least 95%, at least 96%, at least 97%, at least 98%, at least 99% or 100% identity to SEQ ID NO:46. In some aspects, VH2 comprises an amino acid sequence having at least 80%, at least 85%, at least 90%, at least 91%, at least 92%, at least 93%, at least 94%, at least 95%, at least 96%, at least 97%, at least 98%, at least 99% or 100% identity to SEQ ID NO:58, and/or VL2 comprises an amino acid sequence having at least 80%, at least 85%, at least 90%, at least 91%, at least 92%, at least 93%, at least 94%, at least 95%, at least 96%, at least 97%, at least 98%, at least 99% or 100% identity to SEQ ID NO:54. In some aspects, VH4 comprises an amino acid sequence having at least 80%, at least 85%, at least 90%, at least 91%, at least 92%, at least 93%, at least 94%, at least 95%, at least 96%, at least 97%, at least 98%, at least 99% or 100% identity to SEQ ID NO:66, and/or VL4 comprises an amino acid sequence having at least 80%, at least 85%, at least 90%, at least 91%, at least 92%, at least 93%, at least 94%, at least 95%, at least 96%, at least 97%, at least 98%, at least 99% or 100% identity to SEQ ID NO:62. In some preferred aspects, VH1, VH2, VH3, VH4, VL1, VL2, VL3 and VL4 have at least 90% identity with the corresponding amino acid sequences specified above. As used herein, “at least 90% identity” includes at least 91%, 92%, 93%, 94%, 95%, 96%, 97%, 98%, 99% and 100% identity to the recited reference sequence. In some particularly preferred aspects, VH1, VH2, VH3, VH4, VL1, VL2, VL3 and VL4 comprise or consist of the corresponding amino acid sequences specified above.

[0483] In some aspects, each of VH1, VH2, VH3 and VH4 comprise different CDR1, CDR2 and/or CDR3 regions (e.g., a CDR1 comprising an amino acid sequence having at least 80%, at least 85%, at least 90%, at least 91%, at least 92%, at least 93%, at least 94%, at least 95%, at least 96%, at least 97%, at least 98%, at least 99% or 100% identity to any one of SEQ ID NOs:43, 51, 59, 67, 75, 171, 179, 187, 264, 272, 280, 288, 513, 521, 529, 537, 545, 553, 561, 569, 577, 585, 593, 601, 609, 617, 639, 647, 656 and 664; a CDR2 comprising an amino acid sequence having at least 80%, at least 85%, at least 90%, at least 91%, at least 92%, at least 93%, at least 94%, at least 95%, at least 96%, at least 97%, at least 98%, at least 99% or 100% identity to any one of SEQ ID NOs:44, 52, 60, 68, 76, 172, 180, 188, 265, 273, 281, 289, 514, 522, 530, 538, 546, 554, 562, 570, 578, 586, 594, 602, 610, 618, 640, 648, 657 and 665; and/or a CDR3 comprising an amino acid sequence having at least 80%, at least 85%, at least 90%, at least 91%, at least 92%, at least 93%, at least 94%, at least 95%, at least 96%, at least 97%, at least 98%, at least 99% or 100% identity to any one of SEQ ID NOs:45, 53, 61, 69, 77, 173, 181, 189, 266, 274, 282, 290, 515, 523, 531, 539, 547, 555, 563, 571, 579, 587, 595, 603, 611, 619, 641, 649, 658 and 666). In some preferred aspects, CDR1, CDR2 and CDR3 of each of VH1, VH2, VH3 and VH have at least 90% identity with the corresponding amino acid sequences specified above. As used herein, “at least 90% identity” includes at least 91%, 92%, 93%, 94%, 95%, 96%, 97%, 98%, 99% and 100% identity to the recited reference sequence. In some particularly preferred aspects, CDR1, CDR2 and CDR3 of each of VH1, VH2, VH3 and VH4 comprise or consist of the corresponding amino acid sequences specified above.

[0484] In some aspects, each of VL1, VL2, VL3 and VL4 comprise different CDR1, CDR2 and/or CDR3 regions (e.g., a CDR1 comprising an amino acid sequence having at least 80%, at least 85%, at least 90%, at least 91%, at least 92%, at least 93%, at least 94%, at least 95%, at least 96%, at least 97%, at least 98%, at least 99% or 100% identity to any one of SEQ ID NOs:39, 47, 55, 63, 71, 167, 175, 183, 260, 268, 276, 284, 517, 525, 533, 541, 549, 557, 565, 573, 581, 589, 597, 605, 613, 621, 643, 651, 660 and 668; a CDR2 comprising an amino acid sequence having at least 80%, at least 85%, at least 90%, at least 91%, at least 92%, at least 93%, at least 94%, at least 95%, at least 96%, at least 97%, at least 98%, at least 99% or 100% identity to any one of SEQ ID NOs:40, 48, 56, 64, 72, 168, 176, 184, 261, 269, 277 (having the sequence of LGS), 285, 518 (having the sequence of DAS), 526 (having the sequence of DVS), 534 (having the sequence of EDS), 542 (having the sequence of KDS), 550 (having the sequence of DAS), 558 (having the sequence of AAS), 566 (having the sequence of GAS), 574 (having the sequence of DDS), 582 (having the sequence of KDS), 590 (having the sequence of SAS), 598 (having the sequence of SAS), 606 (having the sequence of GAS), 614 (having the sequence of GAS), 622 (having the sequence of GAS, 644 (having the sequence of GAS), 652 (having the sequence of SAS), 661 (having the sequence of GAS) and 669 (having the sequence of DAS); and/or a CDR3 comprising an amino acid sequence having at least 80%, at least 85%, at least 90%, at least 91%, at least 92%, at least 93%, at least 94%, at least 95%, at least 96%, at least 97%, at least 98%, at least 99% or 100% identity to any one of SEQ ID NOs:41, 49, 57, 65, 73, 169, 177, 185, 262, 270, 278, 286, 519, 527, 535, 543, 551, 559, 567, 575, 583, 591, 599, 607, 615, 623, 645, 653, 662 and 670). In some preferred aspects, CDR1, CDR2 and CDR3 of each of VL1, VL2, VL3 and VL4 have at least 90% identity with the corresponding amino acid sequences specified above. As used herein, “at least 90% identity” includes at least 91%, 92%, 93%, 94%, 95%, 96%, 97%, 98%, 99% and 100% identity to the recited reference sequence. In some particularly preferred aspects, CDR1, CDR2 and CDR3 of each of VL1, VL2, VL3 and VL4 comprise or consist of the corresponding amino acid sequences specified above.

[0485] In some aspects, each of VH1, VH2, VH3 and VH4 comprise different CDR1, CDR2 and/or CDR3 regions (e.g., a CDR1 comprising an amino acid sequence having at least 80%, at least 85%, at least 90%, at least 91%, at least 92%, at least 93%, at least 94%, at least 95%, at least 96%, at least 97%, at least 98%, at least 99% or 100% identity to any one of SEQ ID NOs:43, 51, 59, 67, 75, 171, 179, 187, 264, 272, 280, 288, 513, 521, 529, 537, 545, 553, 561, 569, 577, 585, 593, 601, 609, 617, 639, 647, 656 and 664; a CDR2 comprising an amino acid sequence having at least 80%, at least 85%, at least 90%, at least 91%, at least 92%, at least 93%, at least 94%, at least 95%, at least 96%, at least 97%, at least 98%, at least 99% or 100% identity to any one of SEQ ID NOs:44, 52, 60, 68, 76, 172, 180, 188, 265, 273, 281, 289, 514, 522, 530, 538, 546, 554, 562, 570, 578, 586, 594, 602, 610, 618, 640, 648, 657 and 665; and/or a CDR3 comprising an amino acid sequence having at least 80%, at least 85%, at least 90%, at least 91%, at least 92%, at least 93%, at least 94%, at least 95%, at least 96%, at least 97%, at least 98%, at least 99% or 100% identity to any one of SEQ ID NOs:45, 53, 61, 69, 77, 173, 181, 189, 266, 274, 282, 290, 515, 523, 531, 539, 547, 555, 563, 571, 579, 587, 595, 603, 611, 619, 641, 649, 658 and 666); and each of VL1, VL2, VL3 and VL4 comprise different CDR1, CDR2 and/or CDR3 regions (e.g., a CDR1 comprising an amino acid sequence having at least 80%, at least 85%, at least 90%, at least 91%, at least 92%, at least 93%, at least 94%, at least 95%, at least 96%, at least 97%, at least 98%, at least 99% or 100% identity to any one of SEQ ID NOs:39, 47, 55, 63, 71, 167, 175, 183, 260, 268, 276, 284, 517, 525, 533, 541, 549, 557, 565, 573, 581, 589, 597, 605, 613, 621, 643, 651, 660 and 668; a CDR2 comprising an amino acid sequence having at least 80%, at least 85%, at least 90%, at least 91%, at least 92%, at least 93%, at least 94%, at least 95%, at least 96%, at least 97%, at least 98%, at least 99% or 100% identity to any one of SEQ ID NOs:40, 48, 56, 64, 72, 168, 176, 184, 261, 269, 277 (having the sequence of LGS), 285, 518 (having the sequence of DAS), 526 (having the sequence of DVS), 534 (having the sequence of EDS), 542 (having the sequence of KDS), 550 (having the sequence of DAS), 558 (having the sequence of AAS), 566 (having the sequence of GAS), 574 (having the sequence of DDS), 582 (having the sequence of KDS), 590 (having the sequence of SAS), 598 (having the sequence of SAS), 606 (having the sequence of GAS), 614 (having the sequence of GAS), 622 (having the sequence of GAS), 644 (having the sequence of GAS), 652 (having the sequence of SAS), 661 (having the sequence of GAS) and 669 (having the sequence of DAS); and/or a CDR3 comprising an amino acid sequence having at least 80%, at least 85%, at least 90%, at least 91%, at least 92%, at least 93%, at least 94%, at least 95%, at least 96%, at least 97%, at least 98%, at least 99% or 100% identity to any one of SEQ ID NOs:41, 49, 57, 65, 73, 169, 177, 185, 262, 270, 278, 286, 519, 527, 535, 543, 551, 559, 567, 575, 583, 591, 599, 607, 615, 623, 645, 653, 662 and 670). In some preferred aspects, CDR1, CDR2 and CDR3 of each of VH1, VH2, VH3, VH4, VL1, VL2, VL3 and VL4 have at least 90% identity with the corresponding amino acid sequences specified above. As used herein, “at least 90% identity” includes at least 91%, 92%, 93%, 94%, 95%, 96%, 97%, 98%, 99% and 100% identity to the recited reference sequence. In some particularly preferred aspects, CDR1, CDR2 and CDR3 of each of VH1, VH2, VH3, VH4, VL1, VL2, VL3 and VL4 comprise or consist of the corresponding amino acid sequences specified above.

[0486] In some aspects, the VH1 CDR1 comprises an amino acid sequence having at least 80%, at least 85%, at least 90%, at least 91%, at least 92%, at least 93%, at least 94%, at least 95%, at least 96%, at least 97%, at least 98%, at least 99% or 100% identity to SEQ ID NO:59; the VH1 CDR2 comprises an amino acid sequence having at least 80%, at least 85%, at least 90%, at least 91%, at least 92%, at least 93%, at least 94%, at least 95%, at least 96%, at least 97%, at least 98%, at least 99% or 100% identity to SEQ ID NO:60; the VH1 CDR3 comprises an amino acid sequence having at least 80%, at least 85%, at least 90%, at least 91%, at least 92%, at least 93%, at least 94%, at least 95%, at least 96%, at least 97%, at least 98%, at least 99% or 100% identity to SEQ ID NO:61; the VH2 CDR1 comprises an amino acid sequence having at least 80%, at least 85%, at least 90%, at least 91%, at least 92%, at least 93%, at least 94%, at least 95%, at least 96%, at least 97%, at least 98%, at least 99% or 100% identity to SEQ ID NO:51; the VH2 CDR2 comprises an amino acid sequence having at least 80%, at least 85%, at least 90%, at least 91%, at least 92%, at least 93%, at least 94%, at least 95%, at least 96%, at least 97%, at least 98%, at least 99% or 100% identity to SEQ ID NO:52; the VH2 CDR3 comprises an amino acid sequence having at least 80%, at least 85%, at least 90%, at least 91%, at least 92%, at least 93%, at least 94%, at least 95%, at least 96%, at least 97%, at least 98%, at least 99% or 100% identity to SEQ ID NO:53; the VH3 CDR1 comprises an amino acid sequence having at least 80%, at least 85%, at least 90%, at least 91%, at least 92%, at least 93%, at least 94%, at least 95%, at least 96%, at least 97%, at least 98%, at least 99% or 100% identity to SEQ ID NO:67; the VH3 CDR2 comprises an amino acid sequence having at least 80%, at least 85%, at least 90%, at least 91%, at least 92%, at least 93%, at least 94%, at least 95%, at least 96%, at least 97%, at least 98%, at least 99% or 100% identity to SEQ ID NO:68; the VH3 CDR3 comprises an amino acid sequence having at least 80%, at least 85%, at least 90%, at least 91%, at least 92%, at least 93%, at least 94%, at least 95%, at least 96%, at least 97%, at least 98%, at least 99% or 100% identity to SEQ ID NO:69; the VH4 CDR1 comprises an amino acid sequence having at least 80%, at least 85%, at least 90%, at least 91%, at least 92%, at least 93%, at least 94%, at least 95%, at least 96%, at least 97%, at least 98%, at least 99% or 100% identity to SEQ ID NO:75; the VH4 CDR2 comprises an amino acid sequence having at least 80%, at least 85%, at least 90%, at least 91%, at least 92%, at least 93%, at least 94%, at least 95%, at least 96%, at least 97%, at least 98%, at least 99% or 100% identity to SEQ ID NO:76; the VH4 CDR3 comprises an amino acid sequence having at least 80%, at least 85%, at least 90%, at least 91%, at least 92%, at least 93%, at least 94%, at least 95%, at least 96%, at least 97%, at least 98%, at least 99% or 100% identity to SEQ ID NO:77; the VL1 CDR1 comprises an amino acid sequence having at least 80%, at least 85%, at least 90%, at least 91%, at least 92%, at least 93%, at least 94%, at least 95%, at least 96%, at least 97%, at least 98%, at least 99% or 100% identity to SEQ ID NO:55; the VL1 CDR2 comprises an amino acid sequence having at least 80%, at least 85%, at least 90%, at least 91%, at least 92%, at least 93%, at least 94%, at least 95%, at least 96%, at least 97%, at least 98%, at least 99% or 100% identity to SEQ ID NO:56 (having the sequence of GTN); the VL1 CDR3 comprises an amino acid sequence having at least 80%, at least 85%, at least 90%, at least 91%, at least 92%, at least 93%, at least 94%, at least 95%, at least 96%, at least 97%, at least 98%, at least 99% or 100% identity to SEQ ID NO:57; the VL2 CDR1 comprises an amino acid sequence having at least 80%, at least 85%, at least 90%, at least 91%, at least 92%, at least 93%, at least 94%, at least 95%, at least 96%, at least 97%, at least 98%, at least 99% or 100% identity to SEQ ID NO:47; the VL2 CDR2 comprises an amino acid sequence having at least 80%, at least 85%, at least 90%, at least 91%, at least 92%, at least 93%, at least 94%, at least 95%, at least 96%, at least 97%, at least 98%, at least 99% or 100% identity to SEQ ID NO:48 (having the sequence of GAS); the VL2 CDR3 comprises an amino acid sequence having at least 80%, at least 85%, at least 90%, at least 91%, at least 92%, at least 93%, at least 94%, at least 95%, at least 96%, at least 97%, at least 98%, at least 99% or 100% identity to SEQ ID NO:49; the VL3 CDR1 comprises an amino acid sequence having at least 80%, at least 85%, at least 90%, at least 91%, at least 92%, at least 93%, at least 94%, at least 95%, at least 96%, at least 97%, at least 98%, at least 99% or 100% identity to SEQ ID NO:63; the VL3 CDR2 comprises an amino acid sequence having at least 80%, at least 85%, at least 90%, at least 91%, at least 92%, at least 93%, at least 94%, at least 95%, at least 96%, at least 97%, at least 98%, at least 99% or 100% identity to SEQ ID NO:64 (having the sequence of DAS); the VL3 CDR3 comprises an amino acid sequence having at least 80%, at least 85%, at least 90%, at least 91%, at least 92%, at least 93%, at least 94%, at least 95%, at least 96%, at least 97%, at least 98%, at least 99% or 100% identity to SEQ ID NO:65; the VL4 CDR1 comprises an amino acid sequence having at least 80%, at least 85%, at least 90%, at least 91%, at least 92%, at least 93%, at least 94%, at least 95%, at least 96%, at least 97%, at least 98%, at least 99% or 100% identity to SEQ ID NO:39; the VL4 CDR2 comprises an amino acid sequence having at least 80%, at least 85%, at least 90%, at least 91%, at least 92%, at least 93%, at least 94%, at least 95%, at least 96%, at least 97%, at least 98%, at least 99% or 100% identity to SEQ ID NO:40 (having the sequence of GAS); and the VL4 CDR3 comprises an amino acid sequence having at least 80%, at least 85%, at least 90%, at least 91%, at least 92%, at least 93%, at least 94%, at least 95%, at least 96%, at least 97%, at least 98%, at least 99% or 100% identity to SEQ ID NO:41. In some aspects, the linker between VL1 and VL2 has at least 80%, at least 85%, at least 90%, at least 91%, at least 92%, at least 93%, at least 94%, at least 95%, at least 96%, at least 97%, at least 98%, at least 99% or 100% identity to SEQ ID NO:6. In some aspects, the linker between VL2 and VH2 has at least 80%, at least 85%, at least 90%, at least 91%, at least 92%, at least 93%, at least 94%, at least 95%, at least 96%, at least 97%, at least 98%, at least 99% or 100% identity to SEQ ID NO:27. In some aspects, the linker between VH2 and VH1 has at least 80%, at least 85%, at least 90%, at least 91%, at least 92%, at least 93%, at least 94%, at least 95%, at least 96%, at least 97%, at least 98%, at least 99% or 100% identity to SEQ ID NO:6. In some aspects, the linker between VL3 and VL4 has at least 80%, at least 85%, at least 90%, at least 91%, at least 92%, at least 93%, at least 94%, at least 95%, at least 96%, at least 97%, at least 98%, at least 99% or 100% identity to SEQ ID NO:6. In some aspects, the linker between VL4 and VH4 has at least 80%, at least 85%, at least 90%, at least 91%, at least 92%, at least 93%, at least 94%, at least 95%, at least 96%, at least 97%, at least 98%, at least 99% or 100% identity to SEQ ID NO:27. In some aspects, the linker between VH4 and VH3 has at least 80%, at least 85%, at least 90%, at least 91%, at least 92%, at least 93%, at least 94%, at least 95%, at least 96%, at least 97%, at least 98%, at least 99% or 100% identity to SEQ ID NO:6. In some preferred aspects, CDR1, CDR2 and CDR3 of each of VH1, VH2, VH3, VH4, VL1, VL2, VL3 and VL4 have at least 90% identity with the corresponding amino acid sequences specified above, optionally with one or more linker sequence as specified above. As used herein, “at least 90% identity” includes at least 91%, 92%, 93%, 94%, 95%, 96%, 97%, 98%, 99% and 100% identity to the recited reference sequence. In some particularly preferred aspects, CDR1, CDR2 and CDR3 of each of VH1, VH2, VH3, VH4, VL1, VL2, VL3 and VL4 comprise or consist of the corresponding amino acid sequences specified above, optionally with one or more linker sequence as specified above.

[0487] In some aspects, the VH1 CDR1 comprises an amino acid sequence of SEQ ID NO:59; the VH1 CDR2 comprises an amino acid sequence of SEQ ID NO:60; the VH1 CDR3 comprises an amino acid sequence of SEQ ID NO:61; the VH2 CDR1 comprises an amino acid sequence of SEQ ID NO:51; the VH2 CDR2 comprises an amino acid sequence of SEQ ID NO:52; the VH2 CDR3 comprises an amino acid sequence of SEQ ID NO:53; the VH3 CDR1 comprises an amino acid sequence of SEQ ID NO:67; the VH3 CDR2 comprises an amino acid sequence of SEQ ID NO:68; the VH3 CDR3 comprises an amino acid sequence of SEQ ID NO:69; the VH4 CDR1 comprises an amino acid sequence of SEQ ID NO:75; the VH4 CDR2 comprises an amino acid sequence of SEQ ID NO:76; the VH4 CDR3 comprises an amino acid sequence of SEQ ID NO:77; the VL1 CDR1 comprises an amino acid sequence of SEQ ID NO:55; the VL1 CDR2 comprises an amino acid sequence of SEQ ID NO:56 (having the sequence of GTN); the VL1 CDR3 comprises an amino acid sequence of SEQ ID NO:57; the VL2 CDR1 comprises an amino acid sequence of SEQ ID NO:47; the VL2 CDR2 comprises an amino acid sequence of SEQ ID NO:48 (having the sequence of GAS); the VL2 CDR3 comprises an amino acid sequence of SEQ ID NO:49; the VL3 CDR1 comprises an amino acid sequence of SEQ ID NO:63; the VL3 CDR2 comprises an amino acid sequence of SEQ ID NO:64 (having the sequence of DAS); the VL3 CDR3 comprises an amino acid sequence of SEQ ID NO:65; the VL4 CDR1 comprises an amino acid sequence of SEQ ID NO:39; the VL4 CDR2 comprises an amino acid sequence of SEQ ID NO:40 (having the sequence of GAS); and the VL4 CDR3 comprises an amino acid sequence of SEQ ID NO:41. In some aspects, the linker between VL1 and VL2 is SEQ ID NO:6. In some aspects, the linker between VL2 and VH2 is SEQ ID NO:27. In some aspects, the linker between VH2 and VH1 is SEQ ID NO:6. In some aspects, the linker between VL3 and VL4 is SEQ ID NO:6. In some aspects, the linker between VL4 and VH4 is SEQ ID NO:27. In some aspects, the linker between VH4 and VH3 is SEQ ID NO:6.

[0488] In some aspects, the VH1 CDR1 of an antigen binding polypeptide or antigen binding polypeptide complex provided herein comprises an amino acid sequence having at least 80%, at least 85%, at least 90%, at least 91%, at least 92%, at least 93%, at least 94%, at least 95%, at least 96%, at least 97%, at least 98%, at least 99% or 100% identity to SEQ ID NO:59; the VH1 CDR2 comprises an amino acid sequence having at least 80%, at least 85%, at least 90%, at least 91%, at least 92%, at least 93%, at least 94%, at least 95%, at least 96%, at least 97%, at least 98%, at least 99% or 100% identity to SEQ ID NO:60; the VH1 CDR3 comprises an amino acid sequence having at least 80%, at least 85%, at least 90%, at least 91%, at least 92%, at least 93%, at least 94%, at least 95%, at least 96%, at least 97%, at least 98%, at least 99% or 100% identity to SEQ ID NO:61; the VH2 CDR1 comprises an amino acid sequence having at least 80%, at least 85%, at least 90%, at least 91%, at least 92%, at least 93%, at least 94%, at least 95%, at least 96%, at least 97%, at least 98%, at least 99% or 100% identity to SEQ ID NO:179; the VH2 CDR2 comprises an amino acid sequence having at least 80%, at least 85%, at least 90%, at least 91%, at least 92%, at least 93%, at least 94%, at least 95%, at least 96%, at least 97%, at least 98%, at least 99% or 100% identity to SEQ ID NO:180; the VH2 CDR3 comprises an amino acid sequence having at least 80%, at least 85%, at least 90%, at least 91%, at least 92%, at least 93%, at least 94%, at least 95%, at least 96%, at least 97%, at least 98%, at least 99% or 100% identity to SEQ ID NO:181; the VH3 CDR1 comprises an amino acid sequence having at least 80%, at least 85%, at least 90%, at least 91%, at least 92%, at least 93%, at least 94%, at least 95%, at least 96%, at least 97%, at least 98%, at least 99% or 100% identity to SEQ ID NO:59; the VH3 CDR2 comprises an amino acid sequence having at least 80%, at least 85%, at least 90%, at least 91%, at least 92%, at least 93%, at least 94%, at least 95%, at least 96%, at least 97%, at least 98%, at least 99% or 100% identity to SEQ ID NO:60; the VH3 CDR3 comprises an amino acid sequence having at least 80%, at least 85%, at least 90%, at least 91%, at least 92%, at least 93%, at least 94%, at least 95%, at least 96%, at least 97%, at least 98%, at least 99% or 100% identity to SEQ ID NO:61; the VH4 CDR1 comprises an amino acid sequence having at least 80%, at least 85%, at least 90%, at least 91%, at least 92%, at least 93%, at least 94%, at least 95%, at least 96%, at least 97%, at least 98%, at least 99% or 100% identity to SEQ ID NO:179; the VH4 CDR2 comprises an amino acid sequence having at least 80%, at least 85%, at least 90%, at least 91%, at least 92%, at least 93%, at least 94%, at least 95%, at least 96%, at least 97%, at least 98%, at least 99% or 100% identity to SEQ ID NO:180; the VH4 CDR3 comprises an amino acid sequence having at least 80%, at least 85%, at least 90%, at least 91%, at least 92%, at least 93%, at least 94%, at least 95%, at least 96%, at least 97%, at least 98%, at least 99% or 100% identity to SEQ ID NO:181; the VL1 CDR1 comprises an amino acid sequence having at least 80%, at least 85%, at least 90%, at least 91%, at least 92%, at least 93%, at least 94%, at least 95%, at least 96%, at least 97%, at least 98%, at least 99% or 100% identity to SEQ ID NO:55; the VL1 CDR2 comprises an amino acid sequence having at least 80%, at least 85%, at least 90%, at least 91%, at least 92%, at least 93%, at least 94%, at least 95%, at least 96%, at least 97%, at least 98%, at least 99% or 100% identity to SEQ ID NO:56 (having the sequence of GTN); the VL1 CDR3 comprises an amino acid sequence having at least 80%, at least 85%, at least 90%, at least 91%, at least 92%, at least 93%, at least 94%, at least 95%, at least 96%, at least 97%, at least 98%, at least 99% or 100% identity to SEQ ID NO:57; the VL2 CDR1 comprises an amino acid sequence having at least 80%, at least 85%, at least 90%, at least 91%, at least 92%, at least 93%, at least 94%, at least 95%, at least 96%, at least 97%, at least 98%, at least 99% or 100% identity to SEQ ID NO:175; the VL2 CDR2 comprises an amino acid sequence having at least 80%, at least 85%, at least 90%, at least 91%, at least 92%, at least 93%, at least 94%, at least 95%, at least 96%, at least 97%, at least 98%, at least 99% or 100% identity to SEQ ID NO:176; the VL2 CDR3 comprises an amino acid sequence having at least 80%, at least 85%, at least 90%, at least 91%, at least 92%, at least 93%, at least 94%, at least 95%, at least 96%, at least 97%, at least 98%, at least 99% or 100% identity to SEQ ID NO:177; the VL3 CDR1 comprises an amino acid sequence having at least 80%, at least 85%, at least 90%, at least 91%, at least 92%, at least 93%, at least 94%, at least 95%, at least 96%, at least 97%, at least 98%, at least 99% or 100% identity to SEQ ID NO:55; the VL3 CDR2 comprises an amino acid sequence having at least 80%, at least 85%, at least 90%, at least 91%, at least 92%, at least 93%, at least 94%, at least 95%, at least 96%, at least 97%, at least 98%, at least 99% or 100% identity to SEQ ID NO:56 (having the sequence of GTN); the VL3 CDR3 comprises an amino acid sequence having at least 80%, at least 85%, at least 90%, at least 91%, at least 92%, at least 93%, at least 94%, at least 95%, at least 96%, at least 97%, at least 98%, at least 99% or 100% identity to SEQ ID NO:57; the VL4 CDR1 comprises an amino acid sequence having at least 80%, at least 85%, at least 90%, at least 91%, at least 92%, at least 93%, at least 94%, at least 95%, at least 96%, at least 97%, at least 98%, at least 99% or 100% identity to SEQ ID NO:175; the VL4 CDR2 comprises an amino acid sequence having at least 80%, at least 85%, at least 90%, at least 91%, at least 92%, at least 93%, at least 94%, at least 95%, at least 96%, at least 97%, at least 98%, at least 99% or 100% identity to SEQ ID NO:176; and the VL4 CDR3 comprises an amino acid sequence having at least 80%, at least 85%, at least 90%, at least 91%, at least 92%, at least 93%, at least 94%, at least 95%, at least 96%, at least 97%, at least 98%, at least 99% or 100% identity to SEQ ID NO:177. In some aspects, the linker between VL1 and VL2 has at least 80%, at least 85%, at least 90%, at least 91%, at least 92%, at least 93%, at least 94%, at least 95%, at least 96%, at least 97%, at least 98%, at least 99% or 100% identity to SEQ ID NO:6. In some aspects, the linker between VL2 and VH2 has at least 80%, at least 85%, at least 90%, at least 91%, at least 92%, at least 93%, at least 94%, at least 95%, at least 96%, at least 97%, at least 98%, at least 99% or 100% identity to SEQ ID NO:27. In some aspects, the linker between VH2 and VH1 has at least 80%, at least 85%, at least 90%, at least 91%, at least 92%, at least 93%, at least 94%, at least 95%, at least 96%, at least 97%, at least 98%, at least 99% or 100% identity to SEQ ID NO:6. In some aspects, the linker between VL3 and VL4 has at least 80%, at least 85%, at least 90%, at least 91%, at least 92%, at least 93%, at least 94%, at least 95%, at least 96%, at least 97%, at least 98%, at least 99% or 100% identity to SEQ ID NO:6. In some aspects, the linker between VL4 and VH4 has at least 80%, at least 85%, at least 90%, at least 91%, at least 92%, at least 93%, at least 94%, at least 95%, at least 96%, at least 97%, at least 98%, at least 99% or 100% identity to SEQ ID NO:27. In some aspects, the linker between VH4 and VH3 has at least 80%, at least 85%, at least 90%, at least 91%, at least 92%, at least 93%, at least 94%, at least 95%, at least 96%, at least 97%, at least 98%, at least 99% or 100% identity to SEQ ID NO:6. In some aspects, the linker between VH1 and/or VH3 and the Fc region has at least 80%, at least 85%, at least 90%, at least 91%, at least 92%, at least 93%, at least 94%, at least 95%, at least 96%, at least 97%, at least 98%, at least 99% or 100% identity to SEQ ID NO:12. In some preferred aspects, CDR1, CDR2 and CDR3 of each of VH1, VH2, VH3, VH4, VL1, VL2, VL3 and VL4 have at least 90% identity with the corresponding amino acid sequences specified above, optionally with one or more linker sequence as specified above. As used herein, “at least 90% identity” includes at least 91%, 92%, 93%, 94%, 95%, 96%, 97%, 98%, 99% and 100% identity to the recited reference sequence. In some particularly preferred aspects, CDR1, CDR2 and CDR3 of each of VH1, VH2, VH3, VH4, VL1, VL2, VL3 and VL4 comprise or consist of the corresponding amino acid sequences specified above, optionally with one or more linker sequence as specified above.

[0489] In some aspects, the VH1 CDR1 of an antigen binding polypeptide or antigen binding polypeptide complex provided herein comprises an amino acid sequence having at least 80%, at least 85%, at least 90%, at least 91%, at least 92%, at least 93%, at least 94%, at least 95%, at least 96%, at least 97%, at least 98%, at least 99% or 100% identity to SEQ ID NO:67; the VH1 CDR2 comprises an amino acid sequence having at least 80%, at least 85%, at least 90%, at least 91%, at least 92%, at least 93%, at least 94%, at least 95%, at least 96%, at least 97%, at least 98%, at least 99% or 100% identity to SEQ ID NO:68; the VH1 CDR3 comprises an amino acid sequence having at least 80%, at least 85%, at least 90%, at least 91%, at least 92%, at least 93%, at least 94%, at least 95%, at least 96%, at least 97%, at least 98%, at least 99% or 100% identity to SEQ ID NO:69; the VH2 CDR1 comprises an amino acid sequence having at least 80%, at least 85%, at least 90%, at least 91%, at least 92%, at least 93%, at least 94%, at least 95%, at least 96%, at least 97%, at least 98%, at least 99% or 100% identity to SEQ ID NO:179; the VH2 CDR2 comprises an amino acid sequence having at least 80%, at least 85%, at least 90%, at least 91%, at least 92%, at least 93%, at least 94%, at least 95%, at least 96%, at least 97%, at least 98%, at least 99% or 100% identity to SEQ ID NO:180; the VH2 CDR3 comprises an amino acid sequence having at least 80%, at least 85%, at least 90%, at least 91%, at least 92%, at least 93%, at least 94%, at least 95%, at least 96%, at least 97%, at least 98%, at least 99% or 100% identity to SEQ ID NO:181; the VH3 CDR1 comprises an amino acid sequence having at least 80%, at least 85%, at least 90%, at least 91%, at least 92%, at least 93%, at least 94%, at least 95%, at least 96%, at least 97%, at least 98%, at least 99% or 100% identity to SEQ ID NO:67; the VH3 CDR2 comprises an amino acid sequence having at least 80%, at least 85%, at least 90%, at least 91%, at least 92%, at least 93%, at least 94%, at least 95%, at least 96%, at least 97%, at least 98%, at least 99% or 100% identity to SEQ ID NO:68; the VH3 CDR3 comprises an amino acid sequence having at least 80%, at least 85%, at least 90%, at least 91%, at least 92%, at least 93%, at least 94%, at least 95%, at least 96%, at least 97%, at least 98%, at least 99% or 100% identity to SEQ ID NO:69; the VH4 CDR1 comprises an amino acid sequence having at least 80%, at least 85%, at least 90%, at least 91%, at least 92%, at least 93%, at least 94%, at least 95%, at least 96%, at least 97%, at least 98%, at least 99% or 100% identity to SEQ ID NO:179; the VH4 CDR2 comprises an amino acid sequence having at least 80%, at least 85%, at least 90%, at least 91%, at least 92%, at least 93%, at least 94%, at least 95%, at least 96%, at least 97%, at least 98%, at least 99% or 100% identity to SEQ ID NO:180; the VH4 CDR3 comprises an amino acid sequence having at least 80%, at least 85%, at least 90%, at least 91%, at least 92%, at least 93%, at least 94%, at least 95%, at least 96%, at least 97%, at least 98%, at least 99% or 100% identity to SEQ ID NO:181; the VL1 CDR1 comprises an amino acid sequence having at least 80%, at least 85%, at least 90%, at least 91%, at least 92%, at least 93%, at least 94%, at least 95%, at least 96%, at least 97%, at least 98%, at least 99% or 100% identity to SEQ ID NO:63; the VL1 CDR2 comprises an amino acid sequence having at least 80%, at least 85%, at least 90%, at least 91%, at least 92%, at least 93%, at least 94%, at least 95%, at least 96%, at least 97%, at least 98%, at least 99% or 100% identity to SEQ ID NO:64 (having the sequence of DAS); the VL1 CDR3 comprises an amino acid sequence having at least 80%, at least 85%, at least 90%, at least 91%, at least 92%, at least 93%, at least 94%, at least 95%, at least 96%, at least 97%, at least 98%, at least 99% or 100% identity to SEQ ID NO:65; the VL2 CDR1 comprises an amino acid sequence having at least 80%, at least 85%, at least 90%, at least 91%, at least 92%, at least 93%, at least 94%, at least 95%, at least 96%, at least 97%, at least 98%, at least 99% or 100% identity to SEQ ID NO:175; the VL2 CDR2 comprises an amino acid sequence having at least 80%, at least 85%, at least 90%, at least 91%, at least 92%, at least 93%, at least 94%, at least 95%, at least 96%, at least 97%, at least 98%, at least 99% or 100% identity to SEQ ID NO:176; the VL2 CDR3 comprises an amino acid sequence having at least 80%, at least 85%, at least 90%, at least 91%, at least 92%, at least 93%, at least 94%, at least 95%, at least 96%, at least 97%, at least 98%, at least 99% or 100% identity to SEQ ID NO:177; the VL3 CDR1 comprises an amino acid sequence having at least 80%, at least 85%, at least 90%, at least 91%, at least 92%, at least 93%, at least 94%, at least 95%, at least 96%, at least 97%, at least 98%, at least 99% or 100% identity to SEQ ID NO:63; the VL3 CDR2 comprises an amino acid sequence having at least 80%, at least 85%, at least 90%, at least 91%, at least 92%, at least 93%, at least 94%, at least 95%, at least 96%, at least 97%, at least 98%, at least 99% or 100% identity to SEQ ID NO:64 (having the sequence of DAS); the VL3 CDR3 comprises an amino acid sequence having at least 80%, at least 85%, at least 90%, at least 91%, at least 92%, at least 93%, at least 94%, at least 95%, at least 96%, at least 97%, at least 98%, at least 99% or 100% identity to SEQ ID NO:65; the VL4 CDR1 comprises an amino acid sequence having at least 80%, at least 85%, at least 90%, at least 91%, at least 92%, at least 93%, at least 94%, at least 95%, at least 96%, at least 97%, at least 98%, at least 99% or 100% identity to SEQ ID NO:175; the VL4 CDR2 comprises an amino acid sequence having at least 80%, at least 85%, at least 90%, at least 91%, at least 92%, at least 93%, at least 94%, at least 95%, at least 96%, at least 97%, at least 98%, at least 99% or 100% identity to SEQ ID NO:176; and the VL4 CDR3 comprises an amino acid sequence having at least 80%, at least 85%, at least 90%, at least 91%, at least 92%, at least 93%, at least 94%, at least 95%, at least 96%, at least 97%, at least 98%, at least 99% or 100% identity to SEQ ID NO:177. In some aspects, the linker between VL1 and VL2 has at least 80%, at least 85%, at least 90%, at least 91%, at least 92%, at least 93%, at least 94%, at least 95%, at least 96%, at least 97%, at least 98%, at least 99% or 100% identity to SEQ ID NO:6. In some aspects, the linker between VL2 and VH2 has at least 80%, at least 85%, at least 90%, at least 91%, at least 92%, at least 93%, at least 94%, at least 95%, at least 96%, at least 97%, at least 98%, at least 99% or 100% identity to SEQ ID NO:27. In some aspects, the linker between VH2 and VH1 has at least 80%, at least 85%, at least 90%, at least 91%, at least 92%, at least 93%, at least 94%, at least 95%, at least 96%, at least 97%, at least 98%, at least 99% or 100% identity to SEQ ID NO:6. In some aspects, the linker between VL3 and VL4 has at least 80%, at least 85%, at least 90%, at least 91%, at least 92%, at least 93%, at least 94%, at least 95%, at least 96%, at least 97%, at least 98%, at least 99% or 100% identity to SEQ ID NO:6. In some aspects, the linker between VL4 and VH4 has at least 80%, at least 85%, at least 90%, at least 91%, at least 92%, at least 93%, at least 94%, at least 95%, at least 96%, at least 97%, at least 98%, at least 99% or 100% identity to SEQ ID NO:27. In some aspects, the linker between VH4 and VH3 has at least 80%, at least 85%, at least 90%, at least 91%, at least 92%, at least 93%, at least 94%, at least 95%, at least 96%, at least 97%, at least 98%, at least 99% or 100% identity to SEQ ID NO:6. In some aspects, the linker between VH1 and/or VH3 and the Fc region has at least 80%, at least 85%, at least 90%, at least 91%, at least 92%, at least 93%, at least 94%, at least 95%, at least 96%, at least 97%, at least 98%, at least 99% or 100% identity to SEQ ID NO:12. In some preferred aspects, CDR1, CDR2 and CDR3 of each of VH1, VH2, VH3, VH4, VL1, VL2, VL3 and VL4 have at least 90% identity with the corresponding amino acid sequences specified above, optionally with one or more linker sequence as specified above. As used herein, “at least 90% identity” includes at least 91%, 92%, 93%, 94%, 95%, 96%, 97%, 98%, 99% and 100% identity to the recited reference sequence. In some particularly preferred aspects, CDR1, CDR2 and CDR3 of each of VH1, VH2, VH3, VH4, VL1, VL2, VL3 and VL4 comprise or consist of the corresponding amino acid sequences specified above, optionally with one or more linker sequence as specified above.

[0490] In some aspects, the VH1 CDR1 of an antigen binding polypeptide or antigen binding polypeptide complex provided herein comprises an amino acid sequence having at least 80%, at least 85%, at least 90%, at least 91%, at least 92%, at least 93%, at least 94%, at least 95%, at least 96%, at least 97%, at least 98%, at least 99% or 100% identity to SEQ ID NO:59; the VH1 CDR2 comprises an amino acid sequence having at least 80%, at least 85%, at least 90%, at least 91%, at least 92%, at least 93%, at least 94%, at least 95%, at least 96%, at least 97%, at least 98%, at least 99% or 100% identity to SEQ ID NO:60; the VH1 CDR3 comprises an amino acid sequence having at least 80%, at least 85%, at least 90%, at least 91%, at least 92%, at least 93%, at least 94%, at least 95%, at least 96%, at least 97%, at least 98%, at least 99% or 100% identity to SEQ ID NO:61; the VH2 CDR1 comprises an amino acid sequence having at least 80%, at least 85%, at least 90%, at least 91%, at least 92%, at least 93%, at least 94%, at least 95%, at least 96%, at least 97%, at least 98%, at least 99% or 100% identity to SEQ ID NO:171; the VH2 CDR2 comprises an amino acid sequence having at least 80%, at least 85%, at least 90%, at least 91%, at least 92%, at least 93%, at least 94%, at least 95%, at least 96%, at least 97%, at least 98%, at least 99% or 100% identity to SEQ ID NO:172; the VH2 CDR3 comprises an amino acid sequence having at least 80%, at least 85%, at least 90%, at least 91%, at least 92%, at least 93%, at least 94%, at least 95%, at least 96%, at least 97%, at least 98%, at least 99% or 100% identity to SEQ ID NO:173; the VH3 CDR1 comprises an amino acid sequence having at least 80%, at least 85%, at least 90%, at least 91%, at least 92%, at least 93%, at least 94%, at least 95%, at least 96%, at least 97%, at least 98%, at least 99% or 100% identity to SEQ ID NO:59; the VH3 CDR2 comprises an amino acid sequence having at least 80%, at least 85%, at least 90%, at least 91%, at least 92%, at least 93%, at least 94%, at least 95%, at least 96%, at least 97%, at least 98%, at least 99% or 100% identity to SEQ ID NO:60; the VH3 CDR3 comprises an amino acid sequence having at least 80%, at least 85%, at least 90%, at least 91%, at least 92%, at least 93%, at least 94%, at least 95%, at least 96%, at least 97%, at least 98%, at least 99% or 100% identity to SEQ ID NO:61; the VH4 CDR1 comprises an amino acid sequence having at least 80%, at least 85%, at least 90%, at least 91%, at least 92%, at least 93%, at least 94%, at least 95%, at least 96%, at least 97%, at least 98%, at least 99% or 100% identity to SEQ ID NO:171; the VH4 CDR2 comprises an amino acid sequence having at least 80%, at least 85%, at least 90%, at least 91%, at least 92%, at least 93%, at least 94%, at least 95%, at least 96%, at least 97%, at least 98%, at least 99% or 100% identity to SEQ ID NO:172; the VH4 CDR3 comprises an amino acid sequence having at least 80%, at least 85%, at least 90%, at least 91%, at least 92%, at least 93%, at least 94%, at least 95%, at least 96%, at least 97%, at least 98%, at least 99% or 100% identity to SEQ ID NO:173; the VL1 CDR1 comprises an amino acid sequence having at least 80%, at least 85%, at least 90%, at least 91%, at least 92%, at least 93%, at least 94%, at least 95%, at least 96%, at least 97%, at least 98%, at least 99% or 100% identity to SEQ ID NO:55; the VL1 CDR2 comprises an amino acid sequence having at least 80%, at least 85%, at least 90%, at least 91%, at least 92%, at least 93%, at least 94%, at least 95%, at least 96%, at least 97%, at least 98%, at least 99% or 100% identity to SEQ ID NO:56 (having the sequence of GTN); the VL1 CDR3 comprises an amino acid sequence having at least 80%, at least 85%, at least 90%, at least 91%, at least 92%, at least 93%, at least 94%, at least 95%, at least 96%, at least 97%, at least 98%, at least 99% or 100% identity to SEQ ID NO:57; the VL2 CDR1 comprises an amino acid sequence having at least 80%, at least 85%, at least 90%, at least 91%, at least 92%, at least 93%, at least 94%, at least 95%, at least 96%, at least 97%, at least 98%, at least 99% or 100% identity to SEQ ID NO:167; the VL2 CDR2 comprises an amino acid sequence having at least 80%, at least 85%, at least 90%, at least 91%, at least 92%, at least 93%, at least 94%, at least 95%, at least 96%, at least 97%, at least 98%, at least 99% or 100% identity to SEQ ID NO:168; the VL2 CDR3 comprises an amino acid sequence having at least 80%, at least 85%, at least 90%, at least 91%, at least 92%, at least 93%, at least 94%, at least 95%, at least 96%, at least 97%, at least 98%, at least 99% or 100% identity to SEQ ID NO:169; the VL3 CDR1 comprises an amino acid sequence having at least 80%, at least 85%, at least 90%, at least 91%, at least 92%, at least 93%, at least 94%, at least 95%, at least 96%, at least 97%, at least 98%, at least 99% or 100% identity to SEQ ID NO:55; the VL3 CDR2 comprises an amino acid sequence having at least 80%, at least 85%, at least 90%, at least 91%, at least 92%, at least 93%, at least 94%, at least 95%, at least 96%, at least 97%, at least 98%, at least 99% or 100% identity to SEQ ID NO:56 (having the sequence of GTN); the VL3 CDR3 comprises an amino acid sequence having at least 80%, at least 85%, at least 90%, at least 91%, at least 92%, at least 93%, at least 94%, at least 95%, at least 96%, at least 97%, at least 98%, at least 99% or 100% identity to SEQ ID NO:57; the VL4 CDR1 comprises an amino acid sequence having at least 80%, at least 85%, at least 90%, at least 91%, at least 92%, at least 93%, at least 94%, at least 95%, at least 96%, at least 97%, at least 98%, at least 99% or 100% identity to SEQ ID NO:167; the VL4 CDR2 comprises an amino acid sequence having at least 80%, at least 85%, at least 90%, at least 91%, at least 92%, at least 93%, at least 94%, at least 95%, at least 96%, at least 97%, at least 98%, at least 99% or 100% identity to SEQ ID NO:168; and the VL4 CDR3 comprises an amino acid sequence having at least 80%, at least 85%, at least 90%, at least 91%, at least 92%, at least 93%, at least 94%, at least 95%, at least 96%, at least 97%, at least 98%, at least 99% or 100% identity to SEQ ID NO:169. In some aspects, the linker between VL1 and VL2 has at least 80%, at least 85%, at least 90%, at least 91%, at least 92%, at least 93%, at least 94%, at least 95%, at least 96%, at least 97%, at least 98%, at least 99% or 100% identity to SEQ ID NO:6. In some aspects, the linker between VL2 and VH2 has at least 80%, at least 85%, at least 90%, at least 91%, at least 92%, at least 93%, at least 94%, at least 95%, at least 96%, at least 97%, at least 98%, at least 99% or 100% identity to SEQ ID NO:27. In some aspects, the linker between VH2 and VH1 has at least 80%, at least 85%, at least 90%, at least 91%, at least 92%, at least 93%, at least 94%, at least 95%, at least 96%, at least 97%, at least 98%, at least 99% or 100% identity to SEQ ID NO:6. In some aspects, the linker between VL3 and VL4 has at least 80%, at least 85%, at least 90%, at least 91%, at least 92%, at least 93%, at least 94%, at least 95%, at least 96%, at least 97%, at least 98%, at least 99% or 100% identity to SEQ ID NO:6. In some aspects, the linker between VL4 and VH4 has at least 80%, at least 85%, at least 90%, at least 91%, at least 92%, at least 93%, at least 94%, at least 95%, at least 96%, at least 97%, at least 98%, at least 99% or 100% identity to SEQ ID NO:27. In some aspects, the linker between VH4 and VH3 has at least 80%, at least 85%, at least 90%, at least 91%, at least 92%, at least 93%, at least 94%, at least 95%, at least 96%, at least 97%, at least 98%, at least 99% or 100% identity to SEQ ID NO:6. In some aspects, the linker between VH1 and/or VH3 and the Fc region has at least 80%, at least 85%, at least 90%, at least 91%, at least 92%, at least 93%, at least 94%, at least 95%, at least 96%, at least 97%, at least 98%, at least 99% or 100% identity to SEQ ID NO:12. In some preferred aspects, CDR1, CDR2 and CDR3 of each of VH1, VH2, VH3, VH4, VL1, VL2, VL3 and VL4 have at least 90% identity with the corresponding amino acid sequences specified above, optionally with one or more linker sequence as specified above. As used herein, “at least 90% identity” includes at least 91%, 92%, 93%, 94%, 95%, 96%, 97%, 98%, 99% and 100% identity to the recited reference sequence. In some particularly preferred aspects, CDR1, CDR2 and CDR3 of each of VH1, VH2, VH3, VH4, VL1, VL2, VL3 and VL4 comprise or consist of the corresponding amino acid sequences specified above, optionally with one or more linker sequence as specified above.

[0491] In some aspects, the VH1 CDR1 of an antigen binding polypeptide or antigen binding polypeptide complex provided herein comprises an amino acid sequence having at least 80%, at least 85%, at least 90%, at least 91%, at least 92%, at least 93%, at least 94%, at least 95%, at least 96%, at least 97%, at least 98%, at least 99% or 100% identity to SEQ ID NO:63; the VH1 CDR2 comprises an amino acid sequence having at least 80%, at least 85%, at least 90%, at least 91%, at least 92%, at least 93%, at least 94%, at least 95%, at least 96%, at least 97%, at least 98%, at least 99% or 100% identity to SEQ ID NO:64 (having the sequence of DAS); the VH1 CDR3 comprises an amino acid sequence having at least 80%, at least 85%, at least 90%, at least 91%, at least 92%, at least 93%, at least 94%, at least 95%, at least 96%, at least 97%, at least 98%, at least 99% or 100% identity to SEQ ID NO:65; the VH2 CDR1 comprises an amino acid sequence having at least 80%, at least 85%, at least 90%, at least 91%, at least 92%, at least 93%, at least 94%, at least 95%, at least 96%, at least 97%, at least 98%, at least 99% or 100% identity to SEQ ID NO:167; the VH2 CDR2 comprises an amino acid sequence having at least 80%, at least 85%, at least 90%, at least 91%, at least 92%, at least 93%, at least 94%, at least 95%, at least 96%, at least 97%, at least 98%, at least 99% or 100% identity to SEQ ID NO:168; the VH2 CDR3 comprises an amino acid sequence having at least 80%, at least 85%, at least 90%, at least 91%, at least 92%, at least 93%, at least 94%, at least 95%, at least 96%, at least 97%, at least 98%, at least 99% or 100% identity to SEQ ID NO:169; the VH3 CDR1 comprises an amino acid sequence having at least 80%, at least 85%, at least 90%, at least 91%, at least 92%, at least 93%, at least 94%, at least 95%, at least 96%, at least 97%, at least 98%, at least 99% or 100% identity to SEQ ID NO:63; the VH3 CDR2 comprises an amino acid sequence having at least 80%, at least 85%, at least 90%, at least 91%, at least 92%, at least 93%, at least 94%, at least 95%, at least 96%, at least 97%, at least 98%, at least 99% or 100% identity to SEQ ID NO:64 (having the sequence of DAS); the VH3 CDR3 comprises an amino acid sequence having at least 80%, at least 85%, at least 90%, at least 91%, at least 92%, at least 93%, at least 94%, at least 95%, at least 96%, at least 97%, at least 98%, at least 99% or 100% identity to SEQ ID NO:65; the VH4 CDR1 comprises an amino acid sequence having at least 80%, at least 85%, at least 90%, at least 91%, at least 92%, at least 93%, at least 94%, at least 95%, at least 96%, at least 97%, at least 98%, at least 99% or 100% identity to SEQ ID NO:167; the VH4 CDR2 comprises an amino acid sequence having at least 80%, at least 85%, at least 90%, at least 91%, at least 92%, at least 93%, at least 94%, at least 95%, at least 96%, at least 97%, at least 98%, at least 99% or 100% identity to SEQ ID NO:168; the VH4 CDR3 comprises an amino acid sequence having at least 80%, at least 85%, at least 90%, at least 91%, at least 92%, at least 93%, at least 94%, at least 95%, at least 96%, at least 97%, at least 98%, at least 99% or 100% identity to SEQ ID NO:169; the VL1 CDR1 comprises an amino acid sequence having at least 80%, at least 85%, at least 90%, at least 91%, at least 92%, at least 93%, at least 94%, at least 95%, at least 96%, at least 97%, at least 98%, at least 99% or 100% identity to SEQ ID NO:63; the VL1 CDR2 comprises an amino acid sequence having at least 80%, at least 85%, at least 90%, at least 91%, at least 92%, at least 93%, at least 94%, at least 95%, at least 96%, at least 97%, at least 98%, at least 99% or 100% identity to SEQ ID NO:64 (having the sequence of DAS); the VL1 CDR3 comprises an amino acid sequence having at least 80%, at least 85%, at least 90%, at least 91%, at least 92%, at least 93%, at least 94%, at least 95%, at least 96%, at least 97%, at least 98%, at least 99% or 100% identity to SEQ ID NO:65; the VL2 CDR1 comprises an amino acid sequence having at least 80%, at least 85%, at least 90%, at least 91%, at least 92%, at least 93%, at least 94%, at least 95%, at least 96%, at least 97%, at least 98%, at least 99% or 100% identity to SEQ ID NO:167; the VL2 CDR2 comprises an amino acid sequence having at least 80%, at least 85%, at least 90%, at least 91%, at least 92%, at least 93%, at least 94%, at least 95%, at least 96%, at least 97%, at least 98%, at least 99% or 100% identity to SEQ ID NO:168; the VL2 CDR3 comprises an amino acid sequence having at least 80%, at least 85%, at least 90%, at least 91%, at least 92%, at least 93%, at least 94%, at least 95%, at least 96%, at least 97%, at least 98%, at least 99% or 100% identity to SEQ ID NO:169; the VL3 CDR1 comprises an amino acid sequence having at least 80%, at least 85%, at least 90%, at least 91%, at least 92%, at least 93%, at least 94%, at least 95%, at least 96%, at least 97%, at least 98%, at least 99% or 100% identity to SEQ ID NO:63; the VL3 CDR2 comprises an amino acid sequence having at least 80%, at least 85%, at least 90%, at least 91%, at least 92%, at least 93%, at least 94%, at least 95%, at least 96%, at least 97%, at least 98%, at least 99% or 100% identity to SEQ ID NO:64 (having the sequence of DAS); the VL3 CDR3 comprises an amino acid sequence having at least 80%, at least 85%, at least 90%, at least 91%, at least 92%, at least 93%, at least 94%, at least 95%, at least 96%, at least 97%, at least 98%, at least 99% or 100% identity to SEQ ID NO:65; the VL4 CDR1 comprises an amino acid sequence having at least 80%, at least 85%, at least 90%, at least 91%, at least 92%, at least 93%, at least 94%, at least 95%, at least 96%, at least 97%, at least 98%, at least 99% or 100% identity to SEQ ID NO:167; the VL4 CDR2 comprises an amino acid sequence having at least 80%, at least 85%, at least 90%, at least 91%, at least 92%, at least 93%, at least 94%, at least 95%, at least 96%, at least 97%, at least 98%, at least 99% or 100% identity to SEQ ID NO:168; and the VL4 CDR3 comprises an amino acid sequence having at least 80%, at least 85%, at least 90%, at least 91%, at least 92%, at least 93%, at least 94%, at least 95%, at least 96%, at least 97%, at least 98%, at least 99% or 100% identity to SEQ ID NO:169. In some aspects, the linker between VL1 and VL2 has at least 80%, at least 85%, at least 90%, at least 91%, at least 92%, at least 93%, at least 94%, at least 95%, at least 96%, at least 97%, at least 98%, at least 99% or 100% identity to SEQ ID NO:6. In some aspects, the linker between VL2 and VH2 has at least 80%, at least 85%, at least 90%, at least 91%, at least 92%, at least 93%, at least 94%, at least 95%, at least 96%, at least 97%, at least 98%, at least 99% or 100% identity to SEQ ID NO:27. In some aspects, the linker between VH2 and VH1 has at least 80%, at least 85%, at least 90%, at least 91%, at least 92%, at least 93%, at least 94%, at least 95%, at least 96%, at least 97%, at least 98%, at least 99% or 100% identity to SEQ ID NO:6. In some aspects, the linker between VL3 and VL4 has at least 80%, at least 85%, at least 90%, at least 91%, at least 92%, at least 93%, at least 94%, at least 95%, at least 96%, at least 97%, at least 98%, at least 99% or 100% identity to SEQ ID NO:6. In some aspects, the linker between VL4 and VH4 has at least 80%, at least 85%, at least 90%, at least 91%, at least 92%, at least 93%, at least 94%, at least 95%, at least 96%, at least 97%, at least 98%, at least 99% or 100% identity to SEQ ID NO:27. In some aspects, the linker between VH4 and VH3 has at least 80%, at least 85%, at least 90%, at least 91%, at least 92%, at least 93%, at least 94%, at least 95%, at least 96%, at least 97%, at least 98%, at least 99% or 100% identity to SEQ ID NO:6. In some aspects, the linker between VH1 and/or VH3 and the Fc region has at least 80%, at least 85%, at least 90%, at least 91%, at least 92%, at least 93%, at least 94%, at least 95%, at least 96%, at least 97%, at least 98%, at least 99% or 100% identity to SEQ ID NO:12. In some preferred aspects, CDR1, CDR2 and CDR3 of each of VH1, VH2, VH3, VH4, VL1, VL2, VL3 and VL4 have at least 90% identity with the corresponding amino acid sequences specified above, optionally with one or more linker sequence as specified above. As used herein, “at least 90% identity” includes at least 91%, 92%, 93%, 94%, 95%, 96%, 97%, 98%, 99% and 100% identity to the recited reference sequence. In some particularly preferred aspects, CDR1, CDR2 and CDR3 of each of VH1, VH2, VH3, VH4, VL1, VL2, VL3 and VL4 comprise or consist of the corresponding amino acid sequences specified above, optionally with one or more linker sequence as specified above.

[0492] In some aspects, the VH1 CDR1 of an antigen binding polypeptide or antigen binding polypeptide complex provided herein comprises an amino acid sequence having at least 80%, at least 85%, at least 90%, at least 91%, at least 92%, at least 93%, at least 94%, at least 95%, at least 96%, at least 97%, at least 98%, at least 99% or 100% identity to SEQ ID NO:59; the VH1 CDR2 comprises an amino acid sequence having at least 80%, at least 85%, at least 90%, at least 91%, at least 92%, at least 93%, at least 94%, at least 95%, at least 96%, at least 97%, at least 98%, at least 99% or 100% identity to SEQ ID NO:60; the VH1 CDR3 comprises an amino acid sequence having at least 80%, at least 85%, at least 90%, at least 91%, at least 92%, at least 93%, at least 94%, at least 95%, at least 96%, at least 97%, at least 98%, at least 99% or 100% identity to SEQ ID NO:61; the VH2 CDR1 comprises an amino acid sequence having at least 80%, at least 85%, at least 90%, at least 91%, at least 92%, at least 93%, at least 94%, at least 95%, at least 96%, at least 97%, at least 98%, at least 99% or 100% identity to SEQ ID NO:179; the VH2 CDR2 comprises an amino acid sequence having at least 80%, at least 85%, at least 90%, at least 91%, at least 92%, at least 93%, at least 94%, at least 95%, at least 96%, at least 97%, at least 98%, at least 99% or 100% identity to SEQ ID NO:180; the VH2 CDR3 comprises an amino acid sequence having at least 80%, at least 85%, at least 90%, at least 91%, at least 92%, at least 93%, at least 94%, at least 95%, at least 96%, at least 97%, at least 98%, at least 99% or 100% identity to SEQ ID NO:181; the VH3 CDR1 comprises an amino acid sequence having at least 80%, at least 85%, at least 90%, at least 91%, at least 92%, at least 93%, at least 94%, at least 95%, at least 96%, at least 97%, at least 98%, at least 99% or 100% identity to SEQ ID NO:179; the VH3 CDR2 comprises an amino acid sequence having at least 80%, at least 85%, at least 90%, at least 91%, at least 92%, at least 93%, at least 94%, at least 95%, at least 96%, at least 97%, at least 98%, at least 99% or 100% identity to SEQ ID NO:180; the VH3 CDR3 comprises an amino acid sequence having at least 80%, at least 85%, at least 90%, at least 91%, at least 92%, at least 93%, at least 94%, at least 95%, at least 96%, at least 97%, at least 98%, at least 99% or 100% identity to SEQ ID NO:181; the VH4 CDR1 comprises an amino acid sequence having at least 80%, at least 85%, at least 90%, at least 91%, at least 92%, at least 93%, at least 94%, at least 95%, at least 96%, at least 97%, at least 98%, at least 99% or 100% identity to SEQ ID NO:67; the VH4 CDR2 comprises an amino acid sequence having at least 80%, at least 85%, at least 90%, at least 91%, at least 92%, at least 93%, at least 94%, at least 95%, at least 96%, at least 97%, at least 98%, at least 99% or 100% identity to SEQ ID NO:68; the VH4 CDR3 comprises an amino acid sequence having at least 80%, at least 85%, at least 90%, at least 91%, at least 92%, at least 93%, at least 94%, at least 95%, at least 96%, at least 97%, at least 98%, at least 99% or 100% identity to SEQ ID NO:69; the VL1 CDR1 comprises an amino acid sequence having at least 80%, at least 85%, at least 90%, at least 91%, at least 92%, at least 93%, at least 94%, at least 95%, at least 96%, at least 97%, at least 98%, at least 99% or 100% identity to SEQ ID NO:55; the VL1 CDR2 comprises an amino acid sequence having at least 80%, at least 85%, at least 90%, at least 91%, at least 92%, at least 93%, at least 94%, at least 95%, at least 96%, at least 97%, at least 98%, at least 99% or 100% identity to SEQ ID NO:56 (having the sequence of GTN); the VL1 CDR3 comprises an amino acid sequence having at least 80%, at least 85%, at least 90%, at least 91%, at least 92%, at least 93%, at least 94%, at least 95%, at least 96%, at least 97%, at least 98%, at least 99% or 100% identity to SEQ ID NO:57; the VL2 CDR1 comprises an amino acid sequence having at least 80%, at least 85%, at least 90%, at least 91%, at least 92%, at least 93%, at least 94%, at least 95%, at least 96%, at least 97%, at least 98%, at least 99% or 100% identity to SEQ ID NO:175; the VL2 CDR2 comprises an amino acid sequence having at least 80%, at least 85%, at least 90%, at least 91%, at least 92%, at least 93%, at least 94%, at least 95%, at least 96%, at least 97%, at least 98%, at least 99% or 100% identity to SEQ ID NO:176; the VL2 CDR3 comprises an amino acid sequence having at least 80%, at least 85%, at least 90%, at least 91%, at least 92%, at least 93%, at least 94%, at least 95%, at least 96%, at least 97%, at least 98%, at least 99% or 100% identity to SEQ ID NO:177; the VL3 CDR1 comprises an amino acid sequence having at least 80%, at least 85%, at least 90%, at least 91%, at least 92%, at least 93%, at least 94%, at least 95%, at least 96%, at least 97%, at least 98%, at least 99% or 100% identity to SEQ ID NO:175; the VL3 CDR2 comprises an amino acid sequence having at least 80%, at least 85%, at least 90%, at least 91%, at least 92%, at least 93%, at least 94%, at least 95%, at least 96%, at least 97%, at least 98%, at least 99% or 100% identity to SEQ ID NO:176; the VL3 CDR3 comprises an amino acid sequence having at least 80%, at least 85%, at least 90%, at least 91%, at least 92%, at least 93%, at least 94%, at least 95%, at least 96%, at least 97%, at least 98%, at least 99% or 100% identity to SEQ ID NO:177; the VL4 CDR1 comprises an amino acid sequence having at least 80%, at least 85%, at least 90%, at least 91%, at least 92%, at least 93%, at least 94%, at least 95%, at least 96%, at least 97%, at least 98%, at least 99% or 100% identity to SEQ ID NO:63; the VL4 CDR2 comprises an amino acid sequence having at least 80%, at least 85%, at least 90%, at least 91%, at least 92%, at least 93%, at least 94%, at least 95%, at least 96%, at least 97%, at least 98%, at least 99% or 100% identity to SEQ ID NO:64 (having the sequence of DAS); and the VL4 CDR3 comprises an amino acid sequence having at least 80%, at least 85%, at least 90%, at least 91%, at least 92%, at least 93%, at least 94%, at least 95%, at least 96%, at least 97%, at least 98%, at least 99% or 100% identity to SEQ ID NO:65. In some aspects, the linker between VL1 and VL2 has at least 80%, at least 85%, at least 90%, at least 91%, at least 92%, at least 93%, at least 94%, at least 95%, at least 96%, at least 97%, at least 98%, at least 99% or 100% identity to SEQ ID NO:6. In some aspects, the linker between VL2 and VH2 has at least 80%, at least 85%, at least 90%, at least 91%, at least 92%, at least 93%, at least 94%, at least 95%, at least 96%, at least 97%, at least 98%, at least 99% or 100% identity to SEQ ID NO:27. In some aspects, the linker between VH2 and VH1 has at least 80%, at least 85%, at least 90%, at least 91%, at least 92%, at least 93%, at least 94%, at least 95%, at least 96%, at least 97%, at least 98%, at least 99% or 100% identity to SEQ ID NO:6. In some aspects, the linker between VL3 and VL4 has at least 80%, at least 85%, at least 90%, at least 91%, at least 92%, at least 93%, at least 94%, at least 95%, at least 96%, at least 97%, at least 98%, at least 99% or 100% identity to SEQ ID NO:6. In some aspects, the linker between VL4 and VH4 has at least 80%, at least 85%, at least 90%, at least 91%, at least 92%, at least 93%, at least 94%, at least 95%, at least 96%, at least 97%, at least 98%, at least 99% or 100% identity to SEQ ID NO:27. In some aspects, the linker between VH4 and VH3 has at least 80%, at least 85%, at least 90%, at least 91%, at least 92%, at least 93%, at least 94%, at least 95%, at least 96%, at least 97%, at least 98%, at least 99% or 100% identity to SEQ ID NO:6. In some aspects, the linker between VH1 and/or VH3 and the Fc region has at least 80%, at least 85%, at least 90%, at least 91%, at least 92%, at least 93%, at least 94%, at least 95%, at least 96%, at least 97%, at least 98%, at least 99% or 100% identity to SEQ ID NO:12. In some preferred aspects, CDR1, CDR2 and CDR3 of each of VH1, VH2, VH3, VH4, VL1, VL2, VL3 and VL4 have at least 90% identity with the corresponding amino acid sequences specified above, optionally with one or more linker sequence as specified above. As used herein, “at least 90% identity” includes at least 91%, 92%, 93%, 94%, 95%, 96%, 97%, 98%, 99% and 100% identity to the recited reference sequence. In some particularly preferred aspects, CDR1, CDR2 and CDR3 of each of VH1, VH2, VH3, VH4, VL1, VL2, VL3 and VL4 comprise or consist of the corresponding amino acid sequences specified above, optionally with one or more linker sequence as specified above.

[0493] In some aspects, the VH1 CDR1 of an antigen binding polypeptide or antigen binding polypeptide complex provided herein comprises an amino acid sequence having at least 80%, at least 85%, at least 90%, at least 91%, at least 92%, at least 93%, at least 94%, at least 95%, at least 96%, at least 97%, at least 98%, at least 99% or 100% identity to SEQ ID NO:59; the VH1 CDR2 comprises an amino acid sequence having at least 80%, at least 85%, at least 90%, at least 91%, at least 92%, at least 93%, at least 94%, at least 95%, at least 96%, at least 97%, at least 98%, at least 99% or 100% identity to SEQ ID NO:60; the VH1 CDR3 comprises an amino acid sequence having at least 80%, at least 85%, at least 90%, at least 91%, at least 92%, at least 93%, at least 94%, at least 95%, at least 96%, at least 97%, at least 98%, at least 99% or 100% identity to SEQ ID NO:61; the VH2 CDR1 comprises an amino acid sequence having at least 80%, at least 85%, at least 90%, at least 91%, at least 92%, at least 93%, at least 94%, at least 95%, at least 96%, at least 97%, at least 98%, at least 99% or 100% identity to SEQ ID NO:179; the VH2 CDR2 comprises an amino acid sequence having at least 80%, at least 85%, at least 90%, at least 91%, at least 92%, at least 93%, at least 94%, at least 95%, at least 96%, at least 97%, at least 98%, at least 99% or 100% identity to SEQ ID NO:180; the VH2 CDR3 comprises an amino acid sequence having at least 80%, at least 85%, at least 90%, at least 91%, at least 92%, at least 93%, at least 94%, at least 95%, at least 96%, at least 97%, at least 98%, at least 99% or 100% identity to SEQ ID NO:181; the VH3 CDR1 comprises an amino acid sequence having at least 80%, at least 85%, at least 90%, at least 91%, at least 92%, at least 93%, at least 94%, at least 95%, at least 96%, at least 97%, at least 98%, at least 99% or 100% identity to SEQ ID NO:67; the VH3 CDR2 comprises an amino acid sequence having at least 80%, at least 85%, at least 90%, at least 91%, at least 92%, at least 93%, at least 94%, at least 95%, at least 96%, at least 97%, at least 98%, at least 99% or 100% identity to SEQ ID NO:68; the VH3 CDR3 comprises an amino acid sequence having at least 80%, at least 85%, at least 90%, at least 91%, at least 92%, at least 93%, at least 94%, at least 95%, at least 96%, at least 97%, at least 98%, at least 99% or 100% identity to SEQ ID NO:69; the VH4 CDR1 comprises an amino acid sequence having at least 80%, at least 85%, at least 90%, at least 91%, at least 92%, at least 93%, at least 94%, at least 95%, at least 96%, at least 97%, at least 98%, at least 99% or 100% identity to SEQ ID NO:179; the VH4 CDR2 comprises an amino acid sequence having at least 80%, at least 85%, at least 90%, at least 91%, at least 92%, at least 93%, at least 94%, at least 95%, at least 96%, at least 97%, at least 98%, at least 99% or 100% identity to SEQ ID NO:180; the VH4 CDR3 comprises an amino acid sequence having at least 80%, at least 85%, at least 90%, at least 91%, at least 92%, at least 93%, at least 94%, at least 95%, at least 96%, at least 97%, at least 98%, at least 99% or 100% identity to SEQ ID NO:181; the VL1 CDR1 comprises an amino acid sequence having at least 80%, at least 85%, at least 90%, at least 91%, at least 92%, at least 93%, at least 94%, at least 95%, at least 96%, at least 97%, at least 98%, at least 99% or 100% identity to SEQ ID NO:55; the VL1 CDR2 comprises an amino acid sequence having at least 80%, at least 85%, at least 90%, at least 91%, at least 92%, at least 93%, at least 94%, at least 95%, at least 96%, at least 97%, at least 98%, at least 99% or 100% identity to SEQ ID NO:56 (having the sequence of GTN); the VL1 CDR3 comprises an amino acid sequence having at least 80%, at least 85%, at least 90%, at least 91%, at least 92%, at least 93%, at least 94%, at least 95%, at least 96%, at least 97%, at least 98%, at least 99% or 100% identity to SEQ ID NO:57; the VL2 CDR1 comprises an amino acid sequence having at least 80%, at least 85%, at least 90%, at least 91%, at least 92%, at least 93%, at least 94%, at least 95%, at least 96%, at least 97%, at least 98%, at least 99% or 100% identity to SEQ ID NO:175; the VL2 CDR2 comprises an amino acid sequence having at least 80%, at least 85%, at least 90%, at least 91%, at least 92%, at least 93%, at least 94%, at least 95%, at least 96%, at least 97%, at least 98%, at least 99% or 100% identity to SEQ ID NO:176; the VL2 CDR3 comprises an amino acid sequence having at least 80%, at least 85%, at least 90%, at least 91%, at least 92%, at least 93%, at least 94%, at least 95%, at least 96%, at least 97%, at least 98%, at least 99% or 100% identity to SEQ ID NO:177; the VL3 CDR1 comprises an amino acid sequence having at least 80%, at least 85%, at least 90%, at least 91%, at least 92%, at least 93%, at least 94%, at least 95%, at least 96%, at least 97%, at least 98%, at least 99% or 100% identity to SEQ ID NO:63; the VL3 CDR2 comprises an amino acid sequence having at least 80%, at least 85%, at least 90%, at least 91%, at least 92%, at least 93%, at least 94%, at least 95%, at least 96%, at least 97%, at least 98%, at least 99% or 100% identity to SEQ ID NO:64 (having the sequence of DAS); the VL3 CDR3 comprises an amino acid sequence having at least 80%, at least 85%, at least 90%, at least 91%, at least 92%, at least 93%, at least 94%, at least 95%, at least 96%, at least 97%, at least 98%, at least 99% or 100% identity to SEQ ID NO:65; the VL4 CDR1 comprises an amino acid sequence having at least 80%, at least 85%, at least 90%, at least 91%, at least 92%, at least 93%, at least 94%, at least 95%, at least 96%, at least 97%, at least 98%, at least 99% or 100% identity to SEQ ID NO:175; the VL4 CDR2 comprises an amino acid sequence having at least 80%, at least 85%, at least 90%, at least 91%, at least 92%, at least 93%, at least 94%, at least 95%, at least 96%, at least 97%, at least 98%, at least 99% or 100% identity to SEQ ID NO:176; and the VL4 CDR3 comprises an amino acid sequence having at least 80%, at least 85%, at least 90%, at least 91%, at least 92%, at least 93%, at least 94%, at least 95%, at least 96%, at least 97%, at least 98%, at least 99% or 100% identity to SEQ ID NO:177. In some aspects, the linker between VL1 and VL2 has at least 80%, at least 85%, at least 90%, at least 91%, at least 92%, at least 93%, at least 94%, at least 95%, at least 96%, at least 97%, at least 98%, at least 99% or 100% identity to SEQ ID NO:6. In some aspects, the linker between VL2 and VH2 has at least 80%, at least 85%, at least 90%, at least 91%, at least 92%, at least 93%, at least 94%, at least 95%, at least 96%, at least 97%, at least 98%, at least 99% or 100% identity to SEQ ID NO:27. In some aspects, the linker between VH2 and VH1 has at least 80%, at least 85%, at least 90%, at least 91%, at least 92%, at least 93%, at least 94%, at least 95%, at least 96%, at least 97%, at least 98%, at least 99% or 100% identity to SEQ ID NO:6. In some aspects, the linker between VL3 and VL4 has at least 80%, at least 85%, at least 90%, at least 91%, at least 92%, at least 93%, at least 94%, at least 95%, at least 96%, at least 97%, at least 98%, at least 99% or 100% identity to SEQ ID NO:6. In some aspects, the linker between VL4 and VH4 has at least 80%, at least 85%, at least 90%, at least 91%, at least 92%, at least 93%, at least 94%, at least 95%, at least 96%, at least 97%, at least 98%, at least 99% or 100% identity to SEQ ID NO:27. In some aspects, the linker between VH4 and VH3 has at least 80%, at least 85%, at least 90%, at least 91%, at least 92%, at least 93%, at least 94%, at least 95%, at least 96%, at least 97%, at least 98%, at least 99% or 100% identity to SEQ ID NO:6. In some aspects, the linker between VH1 and/or VH3 and the Fc region has at least 80%, at least 85%, at least 90%, at least 91%, at least 92%, at least 93%, at least 94%, at least 95%, at least 96%, at least 97%, at least 98%, at least 99% or 100% identity to SEQ ID NO:12. In some preferred aspects, CDR1, CDR2 and CDR3 of each of VH1, VH2, VH3, VH4, VL1, VL2, VL3 and VL4 have at least 90% identity with the corresponding amino acid sequences specified above, optionally with one or more linker sequence as specified above. As used herein, “at least 90% identity” includes at least 91%, 92%, 93%, 94%, 95%, 96%, 97%, 98%, 99% and 100% identity to the recited reference sequence. In some particularly preferred aspects, CDR1, CDR2 and CDR3 of each of VH1, VH2, VH3, VH4, VL1, VL2, VL3 and VL4 comprise or consist of the corresponding amino acid sequences specified above, optionally with one or more linker sequence as specified above.

[0494] In some aspects, the VH1 CDR1 of an antigen binding polypeptide or antigen binding polypeptide complex provided herein comprises an amino acid sequence having at least 80%, at least 85%, at least 90%, at least 91%, at least 92%, at least 93%, at least 94%, at least 95%, at least 96%, at least 97%, at least 98%, at least 99% or 100% identity to SEQ ID NO:59; the VH1 CDR2 comprises an amino acid sequence having at least 80%, at least 85%, at least 90%, at least 91%, at least 92%, at least 93%, at least 94%, at least 95%, at least 96%, at least 97%, at least 98%, at least 99% or 100% identity to SEQ ID NO:60; the VH1 CDR3 comprises an amino acid sequence having at least 80%, at least 85%, at least 90%, at least 91%, at least 92%, at least 93%, at least 94%, at least 95%, at least 96%, at least 97%, at least 98%, at least 99% or 100% identity to SEQ ID NO:61; the VH2 CDR1 comprises an amino acid sequence having at least 80%, at least 85%, at least 90%, at least 91%, at least 92%, at least 93%, at least 94%, at least 95%, at least 96%, at least 97%, at least 98%, at least 99% or 100% identity to SEQ ID NO:171; the VH2 CDR2 comprises an amino acid sequence having at least 80%, at least 85%, at least 90%, at least 91%, at least 92%, at least 93%, at least 94%, at least 95%, at least 96%, at least 97%, at least 98%, at least 99% or 100% identity to SEQ ID NO:172; the VH2 CDR3 comprises an amino acid sequence having at least 80%, at least 85%, at least 90%, at least 91%, at least 92%, at least 93%, at least 94%, at least 95%, at least 96%, at least 97%, at least 98%, at least 99% or 100% identity to SEQ ID NO:173; the VH3 CDR1 comprises an amino acid sequence having at least 80%, at least 85%, at least 90%, at least 91%, at least 92%, at least 93%, at least 94%, at least 95%, at least 96%, at least 97%, at least 98%, at least 99% or 100% identity to SEQ ID NO:171; the VH3 CDR2 comprises an amino acid sequence having at least 80%, at least 85%, at least 90%, at least 91%, at least 92%, at least 93%, at least 94%, at least 95%, at least 96%, at least 97%, at least 98%, at least 99% or 100% identity to SEQ ID NO:172; the VH3 CDR3 comprises an amino acid sequence having at least 80%, at least 85%, at least 90%, at least 91%, at least 92%, at least 93%, at least 94%, at least 95%, at least 96%, at least 97%, at least 98%, at least 99% or 100% identity to SEQ ID NO:173; the VH4 CDR1 comprises an amino acid sequence having at least 80%, at least 85%, at least 90%, at least 91%, at least 92%, at least 93%, at least 94%, at least 95%, at least 96%, at least 97%, at least 98%, at least 99% or 100% identity to SEQ ID NO:67; the VH4 CDR2 comprises an amino acid sequence having at least 80%, at least 85%, at least 90%, at least 91%, at least 92%, at least 93%, at least 94%, at least 95%, at least 96%, at least 97%, at least 98%, at least 99% or 100% identity to SEQ ID NO:68; the VH4 CDR3 comprises an amino acid sequence having at least 80%, at least 85%, at least 90%, at least 91%, at least 92%, at least 93%, at least 94%, at least 95%, at least 96%, at least 97%, at least 98%, at least 99% or 100% identity to SEQ ID NO:69; the VL1 CDR1 comprises an amino acid sequence having at least 80%, at least 85%, at least 90%, at least 91%, at least 92%, at least 93%, at least 94%, at least 95%, at least 96%, at least 97%, at least 98%, at least 99% or 100% identity to SEQ ID NO:55; the VL1 CDR2 comprises an amino acid sequence having at least 80%, at least 85%, at least 90%, at least 91%, at least 92%, at least 93%, at least 94%, at least 95%, at least 96%, at least 97%, at least 98%, at least 99% or 100% identity to SEQ ID NO:56 (having the sequence of GTN); the VL1 CDR3 comprises an amino acid sequence having at least 80%, at least 85%, at least 90%, at least 91%, at least 92%, at least 93%, at least 94%, at least 95%, at least 96%, at least 97%, at least 98%, at least 99% or 100% identity to SEQ ID NO:57; the VL2 CDR1 comprises an amino acid sequence having at least 80%, at least 85%, at least 90%, at least 91%, at least 92%, at least 93%, at least 94%, at least 95%, at least 96%, at least 97%, at least 98%, at least 99% or 100% identity to SEQ ID NO:167; the VL2 CDR2 comprises an amino acid sequence having at least 80%, at least 85%, at least 90%, at least 91%, at least 92%, at least 93%, at least 94%, at least 95%, at least 96%, at least 97%, at least 98%, at least 99% or 100% identity to SEQ ID NO:168; the VL2 CDR3 comprises an amino acid sequence having at least 80%, at least 85%, at least 90%, at least 91%, at least 92%, at least 93%, at least 94%, at least 95%, at least 96%, at least 97%, at least 98%, at least 99% or 100% identity to SEQ ID NO:169; the VL3 CDR1 comprises an amino acid sequence having at least 80%, at least 85%, at least 90%, at least 91%, at least 92%, at least 93%, at least 94%, at least 95%, at least 96%, at least 97%, at least 98%, at least 99% or 100% identity to SEQ ID NO:167; the VL3 CDR2 comprises an amino acid sequence having at least 80%, at least 85%, at least 90%, at least 91%, at least 92%, at least 93%, at least 94%, at least 95%, at least 96%, at least 97%, at least 98%, at least 99% or 100% identity to SEQ ID NO:168; the VL3 CDR3 comprises an amino acid sequence having at least 80%, at least 85%, at least 90%, at least 91%, at least 92%, at least 93%, at least 94%, at least 95%, at least 96%, at least 97%, at least 98%, at least 99% or 100% identity to SEQ ID NO:169; the VL4 CDR1 comprises an amino acid sequence having at least 80%, at least 85%, at least 90%, at least 91%, at least 92%, at least 93%, at least 94%, at least 95%, at least 96%, at least 97%, at least 98%, at least 99% or 100% identity to SEQ ID NO:63; the VL4 CDR2 comprises an amino acid sequence having at least 80%, at least 85%, at least 90%, at least 91%, at least 92%, at least 93%, at least 94%, at least 95%, at least 96%, at least 97%, at least 98%, at least 99% or 100% identity to SEQ ID NO:64 (having the sequence of DAS); and the VL4 CDR3 comprises an amino acid sequence having at least 80%, at least 85%, at least 90%, at least 91%, at least 92%, at least 93%, at least 94%, at least 95%, at least 96%, at least 97%, at least 98%, at least 99% or 100% identity to SEQ ID NO:65. In some aspects, the linker between VL1 and VL2 has at least 80%, at least 85%, at least 90%, at least 91%, at least 92%, at least 93%, at least 94%, at least 95%, at least 96%, at least 97%, at least 98%, at least 99% or 100% identity to SEQ ID NO:6. In some aspects, the linker between VL2 and VH2 has at least 80%, at least 85%, at least 90%, at least 91%, at least 92%, at least 93%, at least 94%, at least 95%, at least 96%, at least 97%, at least 98%, at least 99% or 100% identity to SEQ ID NO:27. In some aspects, the linker between VH2 and VH1 has at least 80%, at least 85%, at least 90%, at least 91%, at least 92%, at least 93%, at least 94%, at least 95%, at least 96%, at least 97%, at least 98%, at least 99% or 100% identity to SEQ ID NO:6. In some aspects, the linker between VL3 and VL4 has at least 80%, at least 85%, at least 90%, at least 91%, at least 92%, at least 93%, at least 94%, at least 95%, at least 96%, at least 97%, at least 98%, at least 99% or 100% identity to SEQ ID NO:6. In some aspects, the linker between VL4 and VH4 has at least 80%, at least 85%, at least 90%, at least 91%, at least 92%, at least 93%, at least 94%, at least 95%, at least 96%, at least 97%, at least 98%, at least 99% or 100% identity to SEQ ID NO:27. In some aspects, the linker between VH4 and VH3 has at least 80%, at least 85%, at least 90%, at least 91%, at least 92%, at least 93%, at least 94%, at least 95%, at least 96%, at least 97%, at least 98%, at least 99% or 100% identity to SEQ ID NO:6. In some aspects, the linker between VH1 and/or VH3 and the Fc region has at least 80%, at least 85%, at least 90%, at least 91%, at least 92%, at least 93%, at least 94%, at least 95%, at least 96%, at least 97%, at least 98%, at least 99% or 100% identity to SEQ ID NO:12. In some preferred aspects, CDR1, CDR2 and CDR3 of each of VH1, VH2, VH3, VH4, VL1, VL2, VL3 and VL4 have at least 90% identity with the corresponding amino acid sequences specified above, optionally with one or more linker sequence as specified above. As used herein, “at least 90% identity” includes at least 91%, 92%, 93%, 94%, 95%, 96%, 97%, 98%, 99% and 100% identity to the recited reference sequence. In some particularly preferred aspects, CDR1, CDR2 and CDR3 of each of VH1, VH2, VH3, VH4, VL1, VL2, VL3 and VL4 comprise or consist of the corresponding amino acid sequences specified above, optionally with one or more linker sequence as specified above.

[0495] In some aspects, the VH1 CDR1 of an antigen binding polypeptide or antigen binding polypeptide complex provided herein comprises an amino acid sequence having at least 80%, at least 85%, at least 90%, at least 91%, at least 92%, at least 93%, at least 94%, at least 95%, at least 96%, at least 97%, at least 98%, at least 99% or 100% identity to SEQ ID NO:59; the VH1 CDR2 comprises an amino acid sequence having at least 80%, at least 85%, at least 90%, at least 91%, at least 92%, at least 93%, at least 94%, at least 95%, at least 96%, at least 97%, at least 98%, at least 99% or 100% identity to SEQ ID NO:60; the VH1 CDR3 comprises an amino acid sequence having at least 80%, at least 85%, at least 90%, at least 91%, at least 92%, at least 93%, at least 94%, at least 95%, at least 96%, at least 97%, at least 98%, at least 99% or 100% identity to SEQ ID NO:61; the VH2 CDR1 comprises an amino acid sequence having at least 80%, at least 85%, at least 90%, at least 91%, at least 92%, at least 93%, at least 94%, at least 95%, at least 96%, at least 97%, at least 98%, at least 99% or 100% identity to SEQ ID NO:171; the VH2 CDR2 comprises an amino acid sequence having at least 80%, at least 85%, at least 90%, at least 91%, at least 92%, at least 93%, at least 94%, at least 95%, at least 96%, at least 97%, at least 98%, at least 99% or 100% identity to SEQ ID NO:172; the VH2 CDR3 comprises an amino acid sequence having at least 80%, at least 85%, at least 90%, at least 91%, at least 92%, at least 93%, at least 94%, at least 95%, at least 96%, at least 97%, at least 98%, at least 99% or 100% identity to SEQ ID NO:173; the VH3 CDR1 comprises an amino acid sequence having at least 80%, at least 85%, at least 90%, at least 91%, at least 92%, at least 93%, at least 94%, at least 95%, at least 96%, at least 97%, at least 98%, at least 99% or 100% identity to SEQ ID NO:67; the VH3 CDR2 comprises an amino acid sequence having at least 80%, at least 85%, at least 90%, at least 91%, at least 92%, at least 93%, at least 94%, at least 95%, at least 96%, at least 97%, at least 98%, at least 99% or 100% identity to SEQ ID NO:68; the VH3 CDR3 comprises an amino acid sequence having at least 80%, at least 85%, at least 90%, at least 91%, at least 92%, at least 93%, at least 94%, at least 95%, at least 96%, at least 97%, at least 98%, at least 99% or 100% identity to SEQ ID NO:69; the VH4 CDR1 comprises an amino acid sequence having at least 80%, at least 85%, at least 90%, at least 91%, at least 92%, at least 93%, at least 94%, at least 95%, at least 96%, at least 97%, at least 98%, at least 99% or 100% identity to SEQ ID NO:171; the VH4 CDR2 comprises an amino acid sequence having at least 80%, at least 85%, at least 90%, at least 91%, at least 92%, at least 93%, at least 94%, at least 95%, at least 96%, at least 97%, at least 98%, at least 99% or 100% identity to SEQ ID NO:172; the VH4 CDR3 comprises an amino acid sequence having at least 80%, at least 85%, at least 90%, at least 91%, at least 92%, at least 93%, at least 94%, at least 95%, at least 96%, at least 97%, at least 98%, at least 99% or 100% identity to SEQ ID NO:173; the VL1 CDR1 comprises an amino acid sequence having at least 80%, at least 85%, at least 90%, at least 91%, at least 92%, at least 93%, at least 94%, at least 95%, at least 96%, at least 97%, at least 98%, at least 99% or 100% identity to SEQ ID NO:55; the VL1 CDR2 comprises an amino acid sequence having at least 80%, at least 85%, at least 90%, at least 91%, at least 92%, at least 93%, at least 94%, at least 95%, at least 96%, at least 97%, at least 98%, at least 99% or 100% identity to SEQ ID NO:56 (having the sequence of GTN); the VL1 CDR3 comprises an amino acid sequence having at least 80%, at least 85%, at least 90%, at least 91%, at least 92%, at least 93%, at least 94%, at least 95%, at least 96%, at least 97%, at least 98%, at least 99% or 100% identity to SEQ ID NO:57; the VL2 CDR1 comprises an amino acid sequence having at least 80%, at least 85%, at least 90%, at least 91%, at least 92%, at least 93%, at least 94%, at least 95%, at least 96%, at least 97%, at least 98%, at least 99% or 100% identity to SEQ ID NO:167; the VL2 CDR2 comprises an amino acid sequence having at least 80%, at least 85%, at least 90%, at least 91%, at least 92%, at least 93%, at least 94%, at least 95%, at least 96%, at least 97%, at least 98%, at least 99% or 100% identity to SEQ ID NO:168; the VL2 CDR3 comprises an amino acid sequence having at least 80%, at least 85%, at least 90%, at least 91%, at least 92%, at least 93%, at least 94%, at least 95%, at least 96%, at least 97%, at least 98%, at least 99% or 100% identity to SEQ ID NO:169; the VL3 CDR1 comprises an amino acid sequence having at least 80%, at least 85%, at least 90%, at least 91%, at least 92%, at least 93%, at least 94%, at least 95%, at least 96%, at least 97%, at least 98%, at least 99% or 100% identity to SEQ ID NO:63; the VL3 CDR2 comprises an amino acid sequence having at least 80%, at least 85%, at least 90%, at least 91%, at least 92%, at least 93%, at least 94%, at least 95%, at least 96%, at least 97%, at least 98%, at least 99% or 100% identity to SEQ ID NO:64 (having the sequence of DAS); the VL3 CDR3 comprises an amino acid sequence having at least 80%, at least 85%, at least 90%, at least 91%, at least 92%, at least 93%, at least 94%, at least 95%, at least 96%, at least 97%, at least 98%, at least 99% or 100% identity to SEQ ID NO:65; the VL4 CDR1 comprises an amino acid sequence having at least 80%, at least 85%, at least 90%, at least 91%, at least 92%, at least 93%, at least 94%, at least 95%, at least 96%, at least 97%, at least 98%, at least 99% or 100% identity to SEQ ID NO:167; the VL4 CDR2 comprises an amino acid sequence having at least 80%, at least 85%, at least 90%, at least 91%, at least 92%, at least 93%, at least 94%, at least 95%, at least 96%, at least 97%, at least 98%, at least 99% or 100% identity to SEQ ID NO:168; and the VL4 CDR3 comprises an amino acid sequence having at least 80%, at least 85%, at least 90%, at least 91%, at least 92%, at least 93%, at least 94%, at least 95%, at least 96%, at least 97%, at least 98%, at least 99% or 100% identity to SEQ ID NO:169. In some aspects, the linker between VL1 and VL2 has at least 80%, at least 85%, at least 90%, at least 91%, at least 92%, at least 93%, at least 94%, at least 95%, at least 96%, at least 97%, at least 98%, at least 99% or 100% identity to SEQ ID NO:6. In some aspects, the linker between VL2 and VH2 has at least 80%, at least 85%, at least 90%, at least 91%, at least 92%, at least 93%, at least 94%, at least 95%, at least 96%, at least 97%, at least 98%, at least 99% or 100% identity to SEQ ID NO:27. In some aspects, the linker between VH2 and VH1 has at least 80%, at least 85%, at least 90%, at least 91%, at least 92%, at least 93%, at least 94%, at least 95%, at least 96%, at least 97%, at least 98%, at least 99% or 100% identity to SEQ ID NO:6. In some aspects, the linker between VL3 and VL4 has at least 80%, at least 85%, at least 90%, at least 91%, at least 92%, at least 93%, at least 94%, at least 95%, at least 96%, at least 97%, at least 98%, at least 99% or 100% identity to SEQ ID NO:6. In some aspects, the linker between VL4 and VH4 has at least 80%, at least 85%, at least 90%, at least 91%, at least 92%, at least 93%, at least 94%, at least 95%, at least 96%, at least 97%, at least 98%, at least 99% or 100% identity to SEQ ID NO:27. In some aspects, the linker between VH4 and VH3 has at least 80%, at least 85%, at least 90%, at least 91%, at least 92%, at least 93%, at least 94%, at least 95%, at least 96%, at least 97%, at least 98%, at least 99% or 100% identity to SEQ ID NO:6. In some aspects, the linker between VH1 and/or VH3 and the Fc region has at least 80%, at least 85%, at least 90%, at least 91%, at least 92%, at least 93%, at least 94%, at least 95%, at least 96%, at least 97%, at least 98%, at least 99% or 100% identity to SEQ ID NO:12. In some preferred aspects, CDR1, CDR2 and CDR3 of each of VH1, VH2, VH3, VH4, VL1, VL2, VL3 and VL4 have at least 90% identity with the corresponding amino acid sequences specified above, optionally one or more linker sequence as specified above. As used herein, “at least 90% identity” includes at least 91%, 92%, 93%, 94%, 95%, 96%, 97%, 98%, 99% and 100% identity to the recited reference sequence. In some particularly preferred aspects, CDR1, CDR2 and CDR3 of each of VH1, VH2, VH3, VH4, VL1, VL2, VL3 and VL4 comprise or consist of the corresponding amino acid sequences specified above, optionally with one or more linker sequence as specified above.

[0496] In some aspects, the VH1 CDR1 of an antigen binding polypeptide or antigen binding polypeptide complex provided herein comprises an amino acid sequence having at least 80%, at least 85%, at least 90%, at least 91%, at least 92%, at least 93%, at least 94%, at least 95%, at least 96%, at least 97%, at least 98%, at least 99% or 100% identity to SEQ ID NO:183; the VH1 CDR2 comprises an amino acid sequence having at least 80%, at least 85%, at least 90%, at least 91%, at least 92%, at least 93%, at least 94%, at least 95%, at least 96%, at least 97%, at least 98%, at least 99% or 100% identity to SEQ ID NO:184; the VH1 CDR3 comprises an amino acid sequence having at least 80%, at least 85%, at least 90%, at least 91%, at least 92%, at least 93%, at least 94%, at least 95%, at least 96%, at least 97%, at least 98%, at least 99% or 100% identity to SEQ ID NO:185; and/or the VH2 CDR1 comprises an amino acid sequence having at least 80%, at least 85%, at least 90%, at least 91%, at least 92%, at least 93%, at least 94%, at least 95%, at least 96%, at least 97%, at least 98%, at least 99% or 100% identity to SEQ ID NO:183; the VH2 CDR2 comprises an amino acid sequence having at least 80%, at least 85%, at least 90%, at least 91%, at least 92%, at least 93%, at least 94%, at least 95%, at least 96%, at least 97%, at least 98%, at least 99% or 100% identity to SEQ ID NO:184; the VH2 CDR3 comprises an amino acid sequence having at least 80%, at least 85%, at least 90%, at least 91%, at least 92%, at least 93%, at least 94%, at least 95%, at least 96%, at least 97%, at least 98%, at least 99% or 100% identity to SEQ ID NO:185; and/or the VH3 CDR1 comprises an amino acid sequence having at least 80%, at least 85%, at least 90%, at least 91%, at least 92%, at least 93%, at least 94%, at least 95%, at least 96%, at least 97%, at least 98%, at least 99% or 100% identity to SEQ ID NO:183; the VH3 CDR2 comprises an amino acid sequence having at least 80%, at least 85%, at least 90%, at least 91%, at least 92%, at least 93%, at least 94%, at least 95%, at least 96%, at least 97%, at least 98%, at least 99% or 100% identity to SEQ ID NO:184; the VH3 CDR3 comprises an amino acid sequence having at least 80%, at least 85%, at least 90%, at least 91%, at least 92%, at least 93%, at least 94%, at least 95%, at least 96%, at least 97%, at least 98%, at least 99% or 100% identity to SEQ ID NO:185; and/or the VH4 CDR1 comprises an amino acid sequence having at least 80%, at least 85%, at least 90%, at least 91%, at least 92%, at least 93%, at least 94%, at least 95%, at least 96%, at least 97%, at least 98%, at least 99% or 100% identity to SEQ ID NO:183; the VH4 CDR2 comprises an amino acid sequence having at least 80%, at least 85%, at least 90%, at least 91%, at least 92%, at least 93%, at least 94%, at least 95%, at least 96%, at least 97%, at least 98%, at least 99% or 100% identity to SEQ ID NO:184; the VH4 CDR3 comprises an amino acid sequence having at least 80%, at least 85%, at least 90%, at least 91%, at least 92%, at least 93%, at least 94%, at least 95%, at least 96%, at least 97%, at least 98%, at least 99% or 100% identity to SEQ ID NO:185; and/or the VL1 CDR1 comprises an amino acid sequence having at least 80%, at least 85%, at least 90%, at least 91%, at least 92%, at least 93%, at least 94%, at least 95%, at least 96%, at least 97%, at least 98%, at least 99% or 100% identity to SEQ ID NO:187; the VL1 CDR2 comprises an amino acid sequence having at least 80%, at least 85%, at least 90%, at least 91%, at least 92%, at least 93%, at least 94%, at least 95%, at least 96%, at least 97%, at least 98%, at least 99% or 100% identity to SEQ ID NO:188; the VL1 CDR3 comprises an amino acid sequence having at least 80%, at least 85%, at least 90%, at least 91%, at least 92%, at least 93%, at least 94%, at least 95%, at least 96%, at least 97%, at least 98%, at least 99% or 100% identity to SEQ ID NO:189; and/or the VL2 CDR1 comprises an amino acid sequence having at least 80%, at least 85%, at least 90%, at least 91%, at least 92%, at least 93%, at least 94%, at least 95%, at least 96%, at least 97%, at least 98%, at least 99% or 100% identity to SEQ ID NO:187; the VL2 CDR2 comprises an amino acid sequence having at least 80%, at least 85%, at least 90%, at least 91%, at least 92%, at least 93%, at least 94%, at least 95%, at least 96%, at least 97%, at least 98%, at least 99% or 100% identity to SEQ ID NO:188; the VL2 CDR3 comprises an amino acid sequence having at least 80%, at least 85%, at least 90%, at least 91%, at least 92%, at least 93%, at least 94%, at least 95%, at least 96%, at least 97%, at least 98%, at least 99% or 100% identity to SEQ ID NO:189; and/or the VL3 CDR1 comprises an amino acid sequence having at least 80%, at least 85%, at least 90%, at least 91%, at least 92%, at least 93%, at least 94%, at least 95%, at least 96%, at least 97%, at least 98%, at least 99% or 100% identity to SEQ ID NO:187; the VL3 CDR2 comprises an amino acid sequence having at least 80%, at least 85%, at least 90%, at least 91%, at least 92%, at least 93%, at least 94%, at least 95%, at least 96%, at least 97%, at least 98%, at least 99% or 100% identity to SEQ ID NO:188; the VL3 CDR3 comprises an amino acid sequence having at least 80%, at least 85%, at least 90%, at least 91%, at least 92%, at least 93%, at least 94%, at least 95%, at least 96%, at least 97%, at least 98%, at least 99% or 100% identity to SEQ ID NO:189; and/or the VL4 CDR1 comprises an amino acid sequence having at least 80%, at least 85%, at least 90%, at least 91%, at least 92%, at least 93%, at least 94%, at least 95%, at least 96%, at least 97%, at least 98%, at least 99% or 100% identity to SEQ ID NO:187; the VL4 CDR2 comprises an amino acid sequence having at least 80%, at least 85%, at least 90%, at least 91%, at least 92%, at least 93%, at least 94%, at least 95%, at least 96%, at least 97%, at least 98%, at least 99% or 100% identity to SEQ ID NO:188; and the VL4 CDR3 comprises an amino acid sequence having at least 80%, at least 85%, at least 90%, at least 91%, at least 92%, at least 93%, at least 94%, at least 95%, at least 96%, at least 97%, at least 98%, at least 99% or 100% identity to SEQ ID NO:189. In some aspects, the linker between VL1 and VL2 has at least 80%, at least 85%, at least 90%, at least 91%, at least 92%, at least 93%, at least 94%, at least 95%, at least 96%, at least 97%, at least 98%, at least 99% or 100% identity to SEQ ID NO:6. In some aspects, the linker between VL2 and VH2 has at least 80%, at least 85%, at least 90%, at least 91%, at least 92%, at least 93%, at least 94%, at least 95%, at least 96%, at least 97%, at least 98%, at least 99% or 100% identity to SEQ ID NO:27. In some aspects, the linker between VH2 and VH1 has at least 80%, at least 85%, at least 90%, at least 91%, at least 92%, at least 93%, at least 94%, at least 95%, at least 96%, at least 97%, at least 98%, at least 99% or 100% identity to SEQ ID NO:6. In some aspects, the linker between VL3 and VL4 has at least 80%, at least 85%, at least 90%, at least 91%, at least 92%, at least 93%, at least 94%, at least 95%, at least 96%, at least 97%, at least 98%, at least 99% or 100% identity to SEQ ID NO:6. In some aspects, the linker between VL4 and VH4 has at least 80%, at least 85%, at least 90%, at least 91%, at least 92%, at least 93%, at least 94%, at least 95%, at least 96%, at least 97%, at least 98%, at least 99% or 100% identity to SEQ ID NO:27. In some aspects, the linker between VH4 and VH3 has at least 80%, at least 85%, at least 90%, at least 91%, at least 92%, at least 93%, at least 94%, at least 95%, at least 96%, at least 97%, at least 98%, at least 99% or 100% identity to SEQ ID NO:6. In some aspects, the linker between VH1 and/or VH3 and the Fc region has at least 80%, at least 85%, at least 90%, at least 91%, at least 92%, at least 93%, at least 94%, at least 95%, at least 96%, at least 97%, at least 98%, at least 99% or 100% identity to SEQ ID NO:12. In some preferred aspects, CDR1, CDR2 and CDR3 of each of VH1, VH2, VH3, VH4, VL1, VL2, VL3 and VL4 have at least 90% identity with the corresponding amino acid sequences specified above, optionally with one or more linker sequence as specified above. As used herein, “at least 90% identity” includes at least 91%, 92%, 93%, 94%, 95%, 96%, 97%, 98%, 99% and 100% identity to the recited reference sequence. In some particularly preferred aspects, CDR1, CDR2 and CDR3 of each of VH1, VH2, VH3, VH4, VL1, VL2, VL3 and VL4 comprise or consist of the corresponding amino acid sequences specified above, optionally one or more linker sequence as specified above.

[0497] In some aspects, the VH1 CDR1 of an antigen binding polypeptide or antigen binding polypeptide complex provided herein comprises an amino acid sequence having at least 80%, at least 85%, at least 90%, at least 91%, at least 92%, at least 93%, at least 94%, at least 95%, at least 96%, at least 97%, at least 98%, at least 99% or 100% identity to SEQ ID NO:183; the VH1 CDR2 comprises an amino acid sequence having at least 80%, at least 85%, at least 90%, at least 91%, at least 92%, at least 93%, at least 94%, at least 95%, at least 96%, at least 97%, at least 98%, at least 99% or 100% identity to SEQ ID NO:184; the VH1 CDR3 comprises an amino acid sequence having at least 80%, at least 85%, at least 90%, at least 91%, at least 92%, at least 93%, at least 94%, at least 95%, at least 96%, at least 97%, at least 98%, at least 99% or 100% identity to SEQ ID NO:185; the VH2 CDR1 comprises an amino acid sequence having at least 80%, at least 85%, at least 90%, at least 91%, at least 92%, at least 93%, at least 94%, at least 95%, at least 96%, at least 97%, at least 98%, at least 99% or 100% identity to SEQ ID NO:179; the VH2 CDR2 comprises an amino acid sequence having at least 80%, at least 85%, at least 90%, at least 91%, at least 92%, at least 93%, at least 94%, at least 95%, at least 96%, at least 97%, at least 98%, at least 99% or 100% identity to SEQ ID NO:180; the VH2 CDR3 comprises an amino acid sequence having at least 80%, at least 85%, at least 90%, at least 91%, at least 92%, at least 93%, at least 94%, at least 95%, at least 96%, at least 97%, at least 98%, at least 99% or 100% identity to SEQ ID NO:181; the VH3 CDR1 comprises an amino acid sequence having at least 80%, at least 85%, at least 90%, at least 91%, at least 92%, at least 93%, at least 94%, at least 95%, at least 96%, at least 97%, at least 98%, at least 99% or 100% identity to SEQ ID NO:179; the VH3 CDR2 comprises an amino acid sequence having at least 80%, at least 85%, at least 90%, at least 91%, at least 92%, at least 93%, at least 94%, at least 95%, at least 96%, at least 97%, at least 98%, at least 99% or 100% identity to SEQ ID NO:180; the VH3 CDR3 comprises an amino acid sequence having at least 80%, at least 85%, at least 90%, at least 91%, at least 92%, at least 93%, at least 94%, at least 95%, at least 96%, at least 97%, at least 98%, at least 99% or 100% identity to SEQ ID NO:181; the VH4 CDR1 comprises an amino acid sequence having at least 80%, at least 85%, at least 90%, at least 91%, at least 92%, at least 93%, at least 94%, at least 95%, at least 96%, at least 97%, at least 98%, at least 99% or 100% identity to SEQ ID NO:183; the VH4 CDR2 comprises an amino acid sequence having at least 80%, at least 85%, at least 90%, at least 91%, at least 92%, at least 93%, at least 94%, at least 95%, at least 96%, at least 97%, at least 98%, at least 99% or 100% identity to SEQ ID NO:184; the VH4 CDR3 comprises an amino acid sequence having at least 80%, at least 85%, at least 90%, at least 91%, at least 92%, at least 93%, at least 94%, at least 95%, at least 96%, at least 97%, at least 98%, at least 99% or 100% identity to SEQ ID NO:185; the VL1 CDR1 comprises an amino acid sequence having at least 80%, at least 85%, at least 90%, at least 91%, at least 92%, at least 93%, at least 94%, at least 95%, at least 96%, at least 97%, at least 98%, at least 99% or 100% identity to SEQ ID NO:187; the VL1 CDR2 comprises an amino acid sequence having at least 80%, at least 85%, at least 90%, at least 91%, at least 92%, at least 93%, at least 94%, at least 95%, at least 96%, at least 97%, at least 98%, at least 99% or 100% identity to SEQ ID NO:188; the VL1 CDR3 comprises an amino acid sequence having at least 80%, at least 85%, at least 90%, at least 91%, at least 92%, at least 93%, at least 94%, at least 95%, at least 96%, at least 97%, at least 98%, at least 99% or 100% identity to SEQ ID NO:189; the VL2 CDR1 comprises an amino acid sequence having at least 80%, at least 85%, at least 90%, at least 91%, at least 92%, at least 93%, at least 94%, at least 95%, at least 96%, at least 97%, at least 98%, at least 99% or 100% identity to SEQ ID NO:175; the VL2 CDR2 comprises an amino acid sequence having at least 80%, at least 85%, at least 90%, at least 91%, at least 92%, at least 93%, at least 94%, at least 95%, at least 96%, at least 97%, at least 98%, at least 99% or 100% identity to SEQ ID NO:176; the VL2 CDR3 comprises an amino acid sequence having at least 80%, at least 85%, at least 90%, at least 91%, at least 92%, at least 93%, at least 94%, at least 95%, at least 96%, at least 97%, at least 98%, at least 99% or 100% identity to SEQ ID NO:177; the VL3 CDR1 comprises an amino acid sequence having at least 80%, at least 85%, at least 90%, at least 91%, at least 92%, at least 93%, at least 94%, at least 95%, at least 96%, at least 97%, at least 98%, at least 99% or 100% identity to SEQ ID NO:175; the VL3 CDR2 comprises an amino acid sequence having at least 80%, at least 85%, at least 90%, at least 91%, at least 92%, at least 93%, at least 94%, at least 95%, at least 96%, at least 97%, at least 98%, at least 99% or 100% identity to SEQ ID NO:176; the VL3 CDR3 comprises an amino acid sequence having at least 80%, at least 85%, at least 90%, at least 91%, at least 92%, at least 93%, at least 94%, at least 95%, at least 96%, at least 97%, at least 98%, at least 99% or 100% identity to SEQ ID NO:177; the VL4 CDR1 comprises an amino acid sequence having at least 80%, at least 85%, at least 90%, at least 91%, at least 92%, at least 93%, at least 94%, at least 95%, at least 96%, at least 97%, at least 98%, at least 99% or 100% identity to SEQ ID NO:187; the VL4 CDR2 comprises an amino acid sequence having at least 80%, at least 85%, at least 90%, at least 91%, at least 92%, at least 93%, at least 94%, at least 95%, at least 96%, at least 97%, at least 98%, at least 99% or 100% identity to SEQ ID NO:188; and the VL4 CDR3 comprises an amino acid sequence having at least 80%, at least 85%, at least 90%, at least 91%, at least 92%, at least 93%, at least 94%, at least 95%, at least 96%, at least 97%, at least 98%, at least 99% or 100% identity to SEQ ID NO:189. In some aspects, the linker between VL1 and VL2 has at least 80%, at least 85%, at least 90%, at least 91%, at least 92%, at least 93%, at least 94%, at least 95%, at least 96%, at least 97%, at least 98%, at least 99% or 100% identity to SEQ ID NO:6. In some aspects, the linker between VL2 and VH2 has at least 80%, at least 85%, at least 90%, at least 91%, at least 92%, at least 93%, at least 94%, at least 95%, at least 96%, at least 97%, at least 98%, at least 99% or 100% identity to SEQ ID NO:27. In some aspects, the linker between VH2 and VH1 has at least 80%, at least 85%, at least 90%, at least 91%, at least 92%, at least 93%, at least 94%, at least 95%, at least 96%, at least 97%, at least 98%, at least 99% or 100% identity to SEQ ID NO:6. In some aspects, the linker between VL3 and VL4 has at least 80%, at least 85%, at least 90%, at least 91%, at least 92%, at least 93%, at least 94%, at least 95%, at least 96%, at least 97%, at least 98%, at least 99% or 100% identity to SEQ ID NO:6. In some aspects, the linker between VL4 and VH4 has at least 80%, at least 85%, at least 90%, at least 91%, at least 92%, at least 93%, at least 94%, at least 95%, at least 96%, at least 97%, at least 98%, at least 99% or 100% identity to SEQ ID NO:27. In some aspects, the linker between VH4 and VH3 has at least 80%, at least 85%, at least 90%, at least 91%, at least 92%, at least 93%, at least 94%, at least 95%, at least 96%, at least 97%, at least 98%, at least 99% or 100% identity to SEQ ID NO:6. In some aspects, the linker between VH1 and/or VH3 and the Fc region has at least 80%, at least 85%, at least 90%, at least 91%, at least 92%, at least 93%, at least 94%, at least 95%, at least 96%, at least 97%, at least 98%, at least 99% or 100% identity to SEQ ID NO:12. In some preferred aspects, CDR1, CDR2 and CDR3 of each of VH1, VH2, VH3, VH4, VL1, VL2, VL3 and VL4 have at least 90% identity with the corresponding amino acid sequences specified above, optionally one or more linker sequence as specified above. As used herein, “at least 90% identity” includes at least 91%, 92%, 93%, 94%, 95%, 96%, 97%, 98%, 99% and 100% identity to the recited reference sequence. In some particularly preferred aspects, CDR1, CDR2 and CDR3 of each of VH1, VH2, VH3, VH4, VL1, VL2, VL3 and VL4 comprise or consist of the corresponding amino acid sequences specified above, optionally with one or more linker sequence as specified above.

[0498] In some aspects, the VH1 CDR1 of an antigen binding polypeptide or antigen binding polypeptide complex provided herein comprises an amino acid sequence having at least 80%, at least 85%, at least 90%, at least 91%, at least 92%, at least 93%, at least 94%, at least 95%, at least 96%, at least 97%, at least 98%, at least 99% or 100% identity to SEQ ID NO:183; the VH1 CDR2 comprises an amino acid sequence having at least 80%, at least 85%, at least 90%, at least 91%, at least 92%, at least 93%, at least 94%, at least 95%, at least 96%, at least 97%, at least 98%, at least 99% or 100% identity to SEQ ID NO:184; the VH1 CDR3 comprises an amino acid sequence having at least 80%, at least 85%, at least 90%, at least 91%, at least 92%, at least 93%, at least 94%, at least 95%, at least 96%, at least 97%, at least 98%, at least 99% or 100% identity to SEQ ID NO:185; the VH2 CDR1 comprises an amino acid sequence having at least 80%, at least 85%, at least 90%, at least 91%, at least 92%, at least 93%, at least 94%, at least 95%, at least 96%, at least 97%, at least 98%, at least 99% or 100% identity to SEQ ID NO:171; the VH2 CDR2 comprises an amino acid sequence having at least 80%, at least 85%, at least 90%, at least 91%, at least 92%, at least 93%, at least 94%, at least 95%, at least 96%, at least 97%, at least 98%, at least 99% or 100% identity to SEQ ID NO:172; the VH2 CDR3 comprises an amino acid sequence having at least 80%, at least 85%, at least 90%, at least 91%, at least 92%, at least 93%, at least 94%, at least 95%, at least 96%, at least 97%, at least 98%, at least 99% or 100% identity to SEQ ID NO:173; the VH3 CDR1 comprises an amino acid sequence having at least 80%, at least 85%, at least 90%, at least 91%, at least 92%, at least 93%, at least 94%, at least 95%, at least 96%, at least 97%, at least 98%, at least 99% or 100% identity to SEQ ID NO:171; the VH3 CDR2 comprises an amino acid sequence having at least 80%, at least 85%, at least 90%, at least 91%, at least 92%, at least 93%, at least 94%, at least 95%, at least 96%, at least 97%, at least 98%, at least 99% or 100% identity to SEQ ID NO:172; the VH3 CDR3 comprises an amino acid sequence having at least 80%, at least 85%, at least 90%, at least 91%, at least 92%, at least 93%, at least 94%, at least 95%, at least 96%, at least 97%, at least 98%, at least 99% or 100% identity to SEQ ID NO:173; the VH4 CDR1 comprises an amino acid sequence having at least 80%, at least 85%, at least 90%, at least 91%, at least 92%, at least 93%, at least 94%, at least 95%, at least 96%, at least 97%, at least 98%, at least 99% or 100% identity to SEQ ID NO:183; the VH4 CDR2 comprises an amino acid sequence having at least 80%, at least 85%, at least 90%, at least 91%, at least 92%, at least 93%, at least 94%, at least 95%, at least 96%, at least 97%, at least 98%, at least 99% or 100% identity to SEQ ID NO:184; the VH4 CDR3 comprises an amino acid sequence having at least 80%, at least 85%, at least 90%, at least 91%, at least 92%, at least 93%, at least 94%, at least 95%, at least 96%, at least 97%, at least 98%, at least 99% or 100% identity to SEQ ID NO:185; the VL1 CDR1 comprises an amino acid sequence having at least 80%, at least 85%, at least 90%, at least 91%, at least 92%, at least 93%, at least 94%, at least 95%, at least 96%, at least 97%, at least 98%, at least 99% or 100% identity to SEQ ID NO:187; the VL1 CDR2 comprises an amino acid sequence having at least 80%, at least 85%, at least 90%, at least 91%, at least 92%, at least 93%, at least 94%, at least 95%, at least 96%, at least 97%, at least 98%, at least 99% or 100% identity to SEQ ID NO:188; the VL1 CDR3 comprises an amino acid sequence having at least 80%, at least 85%, at least 90%, at least 91%, at least 92%, at least 93%, at least 94%, at least 95%, at least 96%, at least 97%, at least 98%, at least 99% or 100% identity to SEQ ID NO:189; the VL2 CDR1 comprises an amino acid sequence having at least 80%, at least 85%, at least 90%, at least 91%, at least 92%, at least 93%, at least 94%, at least 95%, at least 96%, at least 97%, at least 98%, at least 99% or 100% identity to SEQ ID NO:167; the VL2 CDR2 comprises an amino acid sequence having at least 80%, at least 85%, at least 90%, at least 91%, at least 92%, at least 93%, at least 94%, at least 95%, at least 96%, at least 97%, at least 98%, at least 99% or 100% identity to SEQ ID NO:168; the VL2 CDR3 comprises an amino acid sequence having at least 80%, at least 85%, at least 90%, at least 91%, at least 92%, at least 93%, at least 94%, at least 95%, at least 96%, at least 97%, at least 98%, at least 99% or 100% identity to SEQ ID NO:169; the VL3 CDR1 comprises an amino acid sequence having at least 80%, at least 85%, at least 90%, at least 91%, at least 92%, at least 93%, at least 94%, at least 95%, at least 96%, at least 97%, at least 98%, at least 99% or 100% identity to SEQ ID NO:167; the VL3 CDR2 comprises an amino acid sequence having at least 80%, at least 85%, at least 90%, at least 91%, at least 92%, at least 93%, at least 94%, at least 95%, at least 96%, at least 97%, at least 98%, at least 99% or 100% identity to SEQ ID NO:168; the VL3 CDR3 comprises an amino acid sequence having at least 80%, at least 85%, at least 90%, at least 91%, at least 92%, at least 93%, at least 94%, at least 95%, at least 96%, at least 97%, at least 98%, at least 99% or 100% identity to SEQ ID NO:169; the VL4 CDR1 comprises an amino acid sequence having at least 80%, at least 85%, at least 90%, at least 91%, at least 92%, at least 93%, at least 94%, at least 95%, at least 96%, at least 97%, at least 98%, at least 99% or 100% identity to SEQ ID NO:187; the VL4 CDR2 comprises an amino acid sequence having at least 80%, at least 85%, at least 90%, at least 91%, at least 92%, at least 93%, at least 94%, at least 95%, at least 96%, at least 97%, at least 98%, at least 99% or 100% identity to SEQ ID NO:188; and the VL4 CDR3 comprises an amino acid sequence having at least 80%, at least 85%, at least 90%, at least 91%, at least 92%, at least 93%, at least 94%, at least 95%, at least 96%, at least 97%, at least 98%, at least 99% or 100% identity to SEQ ID NO:189. In some aspects, the linker between VL1 and VL2 has at least 80%, at least 85%, at least 90%, at least 91%, at least 92%, at least 93%, at least 94%, at least 95%, at least 96%, at least 97%, at least 98%, at least 99% or 100% identity to SEQ ID NO:6. In some aspects, the linker between VL2 and VH2 has at least 80%, at least 85%, at least 90%, at least 91%, at least 92%, at least 93%, at least 94%, at least 95%, at least 96%, at least 97%, at least 98%, at least 99% or 100% identity to SEQ ID NO:27. In some aspects, the linker between VH2 and VH1 has at least 80%, at least 85%, at least 90%, at least 91%, at least 92%, at least 93%, at least 94%, at least 95%, at least 96%, at least 97%, at least 98%, at least 99% or 100% identity to SEQ ID NO:6. In some aspects, the linker between VL3 and VL4 has at least 80%, at least 85%, at least 90%, at least 91%, at least 92%, at least 93%, at least 94%, at least 95%, at least 96%, at least 97%, at least 98%, at least 99% or 100% identity to SEQ ID NO:6. In some aspects, the linker between VL4 and VH4 has at least 80%, at least 85%, at least 90%, at least 91%, at least 92%, at least 93%, at least 94%, at least 95%, at least 96%, at least 97%, at least 98%, at least 99% or 100% identity to SEQ ID NO:27. In some aspects, the linker between VH4 and VH3 has at least 80%, at least 85%, at least 90%, at least 95%, at least 99% or 100% identity to SEQ ID NO:6. In some aspects, the linker between VH1 and/or VH3 and the Fc region has at least 80%, at least 85%, at least 90%, at least 95%, at least 99% or 100% identity to SEQ ID NO:12. In some preferred aspects, CDR1, CDR2 and CDR3 of each of VH1, VH2, VH3, VH4, VL1, VL2, VL3 and VL4 have at least 90% identity with the corresponding amino acid sequences specified above, optionally with one or more linker sequence as specified above. As used herein, “at least 90% identity” includes at least 91%, 92%, 93%, 94%, 95%, 96%, 97%, 98%, 99% and 100% identity to the recited reference sequence. In some particularly preferred aspects, CDR1, CDR2 and CDR3 of each of VH1, VH2, VH3, VH4, VL1, VL2, VL3 and VL4 comprise or consist of the corresponding amino acid sequences specified above, optionally one or more linker sequence as specified above.

[0499] In some aspects, VH1 of an antigen binding polypeptide or antigen binding polypeptide complex provided herein comprises an amino acid sequence having at least 80%, at least 85%, at least 90%, at least 91%, at least 92%, at least 93%, at least 94%, at least 95%, at least 96%, at least 97%, at least 98%, at least 99% or 100% identity to SEQ ID NO:58; VH2 comprises an amino acid sequence having at least 80%, at least 85%, at least 90%, at least 91%, at least 92%, at least 93%, at least 94%, at least 95%, at least 96%, at least 97%, at least 98%, at least 99% or 100% identity to SEQ ID NO:178; VH3 comprises an amino acid sequence having at least 80%, at least 85%, at least 90%, at least 91%, at least 92%, at least 93%, at least 94%, at least 95%, at least 96%, at least 97%, at least 98%, at least 99% or 100% identity to SEQ ID NO:58; VH4 comprises an amino acid sequence having at least 80%, at least 85%, at least 90%, at least 91%, at least 92%, at least 93%, at least 94%, at least 95%, at least 96%, at least 97%, at least 98%, at least 99% or 100% identity to SEQ ID NO:178; VL1 comprises an amino acid sequence having at least 80%, at least 85%, at least 90%, at least 91%, at least 92%, at least 93%, at least 94%, at least 95%, at least 96%, at least 97%, at least 98%, at least 99% or 100% identity to SEQ ID NO:54; VL2 comprises an amino acid sequence having at least 80%, at least 85%, at least 90%, at least 91%, at least 92%, at least 93%, at least 94%, at least 95%, at least 96%, at least 97%, at least 98%, at least 99% or 100% identity to SEQ ID NO:174; VL3 comprises an amino acid sequence having at least 80%, at least 85%, at least 90%, at least 91%, at least 92%, at least 93%, at least 94%, at least 95%, at least 96%, at least 97%, at least 98%, at least 99% or 100% identity to SEQ ID NO:54; and VL4 comprises an amino acid sequence having at least 80%, at least 85%, at least 90%, at least 91%, at least 92%, at least 93%, at least 94%, at least 95%, at least 96%, at least 97%, at least 98%, at least 99% or 100% identity to SEQ ID NO:174. In some preferred aspects, VH1, VH2, VH3, VH4, VL1, VL2, VL3 and VL4 have at least 90% identity with the corresponding amino acid sequences specified above. As used herein, “at least 90% identity” includes at least 91%, 92%, 93%, 94%, 95%, 96%, 97%, 98%, 99% and 100% identity to the recited reference sequence. In some particularly preferred aspects, VH1, VH2, VH3, VH4, VL1, VL2, VL3 and VL4 comprise or consist of the corresponding amino acid sequences specified above.

[0500] In some aspects, VH1 of an antigen binding polypeptide or antigen binding polypeptide complex provided herein comprises an amino acid sequence having at least 80%, at least 85%, at least 90%, at least 91%, at least 92%, at least 93%, at least 94%, at least 95%, at least 96%, at least 97%, at least 98%, at least 99% or 100% identity to SEQ ID NO:66; VH2 comprises an amino acid sequence having at least 80%, at least 85%, at least 90%, at least 91%, at least 92%, at least 93%, at least 94%, at least 95%, at least 96%, at least 97%, at least 98%, at least 99% or 100% identity to SEQ ID NO:178; VH3 comprises an amino acid sequence having at least 80%, at least 85%, at least 90%, at least 91%, at least 92%, at least 93%, at least 94%, at least 95%, at least 96%, at least 97%, at least 98%, at least 99% or 100% identity to SEQ ID NO:66; VH4 comprises an amino acid sequence having at least 80%, at least 85%, at least 90%, at least 91%, at least 92%, at least 93%, at least 94%, at least 95%, at least 96%, at least 97%, at least 98%, at least 99% or 100% identity to SEQ ID NO:178; VL1 comprises an amino acid sequence having at least 80%, at least 85%, at least 90%, at least 91%, at least 92%, at least 93%, at least 94%, at least 95%, at least 96%, at least 97%, at least 98%, at least 99% or 100% identity to SEQ ID NO:62; VL2 comprises an amino acid sequence having at least 80%, at least 85%, at least 90%, at least 91%, at least 92%, at least 93%, at least 94%, at least 95%, at least 96%, at least 97%, at least 98%, at least 99% or 100% identity to SEQ ID NO:174; VL3 comprises an amino acid sequence having at least 80%, at least 85%, at least 90%, at least 91%, at least 92%, at least 93%, at least 94%, at least 95%, at least 96%, at least 97%, at least 98%, at least 99% or 100% identity to SEQ ID NO:62; and VL4 comprises an amino acid sequence having at least 80%, at least 85%, at least 90%, at least 91%, at least 92%, at least 93%, at least 94%, at least 95%, at least 96%, at least 97%, at least 98%, at least 99% or 100% identity to SEQ ID NO:174. In some preferred aspects, VH1, VH2, VH3, VH4, VL1, VL2, VL3 and VL4 have at least 90% identity with the corresponding amino acid sequences specified above. As used herein, “at least 90% identity” includes at least 91%, 92%, 93%, 94%, 95%, 96%, 97%, 98%, 99% and 100% identity to the recited reference sequence. In some particularly preferred aspects, VH1, VH2, VH3, VH4, VL1, VL2, VL3 and VL4 comprise or consist of the corresponding amino acid sequences specified above.

[0501] In some aspects, VH1 of an antigen binding polypeptide or antigen binding polypeptide complex provided herein comprises an amino acid sequence having at least 80%, at least 85%, at least 90%, at least 91%, at least 92%, at least 93%, at least 94%, at least 95%, at least 96%, at least 97%, at least 98%, at least 99% or 100% identity to SEQ ID NO:58; VH2 comprises an amino acid sequence having at least 80%, at least 85%, at least 90%, at least 91%, at least 92%, at least 93%, at least 94%, at least 95%, at least 96%, at least 97%, at least 98%, at least 99% or 100% identity to SEQ ID NO:170; VH3 comprises an amino acid sequence having at least 80%, at least 85%, at least 90%, at least 91%, at least 92%, at least 93%, at least 94%, at least 95%, at least 96%, at least 97%, at least 98%, at least 99% or 100% identity to SEQ ID NO:58; VH4 comprises an amino acid sequence having at least 80%, at least 85%, at least 90%, at least 91%, at least 92%, at least 93%, at least 94%, at least 95%, at least 96%, at least 97%, at least 98%, at least 99% or 100% identity to SEQ ID NO:170; VL1 comprises an amino acid sequence having at least 80%, at least 85%, at least 90%, at least 91%, at least 92%, at least 93%, at least 94%, at least 95%, at least 96%, at least 97%, at least 98%, at least 99% or 100% identity to SEQ ID NO:54; VL2 comprises an amino acid sequence having at least 80%, at least 85%, at least 90%, at least 91%, at least 92%, at least 93%, at least 94%, at least 95%, at least 96%, at least 97%, at least 98%, at least 99% or 100% identity to SEQ ID NO:166; VL3 comprises an amino acid sequence having at least 80%, at least 85%, at least 90%, at least 91%, at least 92%, at least 93%, at least 94%, at least 95%, at least 96%, at least 97%, at least 98%, at least 99% or 100% identity to SEQ ID NO:54; and VL4 comprises an amino acid sequence having at least 80%, at least 85%, at least 90%, at least 91%, at least 92%, at least 93%, at least 94%, at least 95%, at least 96%, at least 97%, at least 98%, at least 99% or 100% identity to SEQ ID NO:166. In some preferred aspects, VH1, VH2, VH3, VH4, VL1, VL2, VL3 and VL4 have at least 90% identity with the corresponding amino acid sequences specified above. As used herein, “at least 90% identity” includes at least 91%, 92%, 93%, 94%, 95%, 96%, 97%, 98%, 99% and 100% identity to the recited reference sequence. In some particularly preferred aspects, VH1, VH2, VH3, VH4, VL1, VL2, VL3 and VL4 comprise or consist of the corresponding amino acid sequences specified above.

[0502] In some aspects, VH1 of an antigen binding polypeptide or antigen binding polypeptide complex provided herein comprises an amino acid sequence having at least 80%, at least 85%, at least 90%, at least 91%, at least 92%, at least 93%, at least 94%, at least 95%, at least 96%, at least 97%, at least 98%, at least 99% or 100% identity to SEQ ID NO:66; VH2 comprises an amino acid sequence having at least 80%, at least 85%, at least 90%, at least 91%, at least 92%, at least 93%, at least 94%, at least 95%, at least 96%, at least 97%, at least 98%, at least 99% or 100% identity to SEQ ID NO:170; VH3 comprises an amino acid sequence having at least 80%, at least 85%, at least 90%, at least 91%, at least 92%, at least 93%, at least 94%, at least 95%, at least 96%, at least 97%, at least 98%, at least 99% or 100% identity to SEQ ID NO:66; VH4 comprises an amino acid sequence having at least 80%, at least 85%, at least 90%, at least 91%, at least 92%, at least 93%, at least 94%, at least 95%, at least 96%, at least 97%, at least 98%, at least 99% or 100% identity to SEQ ID NO:170; VL1 comprises an amino acid sequence having at least 80%, at least 85%, at least 90%, at least 91%, at least 92%, at least 93%, at least 94%, at least 95%, at least 96%, at least 97%, at least 98%, at least 99% or 100% identity to SEQ ID NO:62; VL2 comprises an amino acid sequence having at least 80%, at least 85%, at least 90%, at least 91%, at least 92%, at least 93%, at least 94%, at least 95%, at least 96%, at least 97%, at least 98%, at least 99% or 100% identity to SEQ ID NO:166; VL3 comprises an amino acid sequence having at least 80%, at least 85%, at least 90%, at least 91%, at least 92%, at least 93%, at least 94%, at least 95%, at least 96%, at least 97%, at least 98%, at least 99% or 100% identity to SEQ ID NO:62; and VL4 comprises an amino acid sequence having at least 80%, at least 85%, at least 90%, at least 91%, at least 92%, at least 93%, at least 94%, at least 95%, at least 96%, at least 97%, at least 98%, at least 99% or 100% identity to SEQ ID NO:166. In some preferred aspects, VH1, VH2, VH3, VH4, VL1, VL2, VL3 and VL4 have at least 90% identity with the corresponding amino acid sequences specified above. As used herein, “at least 90% identity” includes at least 91%, 92%, 93%, 94%, 95%, 96%, 97%, 98%, 99% and 100% identity to the recited reference sequence. In some particularly preferred aspects, VH1, VH2, VH3, VH4, VL1, VL2, VL3 and VL4 comprise or consist of the corresponding amino acid sequences specified above.

[0503] In some aspects, VH1 of an antigen binding polypeptide or antigen binding polypeptide complex provided herein comprises an amino acid sequence having at least 80%, at least 85%, at least 90%, at least 91%, at least 92%, at least 93%, at least 94%, at least 95%, at least 96%, at least 97%, at least 98%, at least 99% or 100% identity to SEQ ID NO:58; VH2 comprises an amino acid sequence having at least 80%, at least 85%, at least 90%, at least 91%, at least 92%, at least 93%, at least 94%, at least 95%, at least 96%, at least 97%, at least 98%, at least 99% or 100% identity to SEQ ID NO:178; VH3 comprises an amino acid sequence having at least 80%, at least 85%, at least 90%, at least 91%, at least 92%, at least 93%, at least 94%, at least 95%, at least 96%, at least 97%, at least 98%, at least 99% or 100% identity to SEQ ID NO:178; VH4 comprises an amino acid sequence having at least 80%, at least 85%, at least 90%, at least 91%, at least 92%, at least 93%, at least 94%, at least 95%, at least 96%, at least 97%, at least 98%, at least 99% or 100% identity to SEQ ID NO:66; VL1 comprises an amino acid sequence having at least 80%, at least 85%, at least 90%, at least 91%, at least 92%, at least 93%, at least 94%, at least 95%, at least 96%, at least 97%, at least 98%, at least 99% or 100% identity to SEQ ID NO:54; VL2 comprises an amino acid sequence having at least 80%, at least 85%, at least 90%, at least 91%, at least 92%, at least 93%, at least 94%, at least 95%, at least 96%, at least 97%, at least 98%, at least 99% or 100% identity to SEQ ID NO:174; VL3 comprises an amino acid sequence having at least 80%, at least 85%, at least 90%, at least 91%, at least 92%, at least 93%, at least 94%, at least 95%, at least 96%, at least 97%, at least 98%, at least 99% or 100% identity to SEQ ID NO:174; and VL4 comprises an amino acid sequence having at least 80%, at least 85%, at least 90%, at least 91%, at least 92%, at least 93%, at least 94%, at least 95%, at least 96%, at least 97%, at least 98%, at least 99% or 100% identity to SEQ ID NO:62. In some preferred aspects, VH1, VH2, VH3, VH4, VL1, VL2, VL3 and VL4 have at least 90% identity with the corresponding amino acid sequences specified above. As used herein, “at least 90% identity” includes at least 91%, 92%, 93%, 94%, 95%, 96%, 97%, 98%, 99% and 100% identity to the recited reference sequence. In some particularly preferred aspects, VH1, VH2, VH3, VH4, VL1, VL2, VL3 and VL4 comprise or consist of the corresponding amino acid sequences specified above.

[0504] In some aspects, VH1 of an antigen binding polypeptide or antigen binding polypeptide complex provided herein comprises an amino acid sequence having at least 80%, at least 85%, at least 90%, at least 91%, at least 92%, at least 93%, at least 94%, at least 95%, at least 96%, at least 97%, at least 98%, at least 99% or 100% identity to SEQ ID NO:58; VH2 comprises an amino acid sequence having at least 80%, at least 85%, at least 90%, at least 91%, at least 92%, at least 93%, at least 94%, at least 95%, at least 96%, at least 97%, at least 98%, at least 99% or 100% identity to SEQ ID NO:178; VH3 comprises an amino acid sequence having at least 80%, at least 85%, at least 90%, at least 91%, at least 92%, at least 93%, at least 94%, at least 95%, at least 96%, at least 97%, at least 98%, at least 99% or 100% identity to SEQ ID NO:66; VH4 comprises an amino acid sequence having at least 80%, at least 85%, at least 90%, at least 91%, at least 92%, at least 93%, at least 94%, at least 95%, at least 96%, at least 97%, at least 98%, at least 99% or 100% identity to SEQ ID NO:178; VL1 comprises an amino acid sequence having at least 80%, at least 85%, at least 90%, at least 91%, at least 92%, at least 93%, at least 94%, at least 95%, at least 96%, at least 97%, at least 98%, at least 99% or 100% identity to SEQ ID NO:54; VL2 comprises an amino acid sequence having at least 80%, at least 85%, at least 90%, at least 91%, at least 92%, at least 93%, at least 94%, at least 95%, at least 96%, at least 97%, at least 98%, at least 99% or 100% identity to SEQ ID NO:174; VL3 comprises an amino acid sequence having at least 80%, at least 85%, at least 90%, at least 91%, at least 92%, at least 93%, at least 94%, at least 95%, at least 96%, at least 97%, at least 98%, at least 99% or 100% identity to SEQ ID NO:62; and VL4 comprises an amino acid sequence having at least 80%, at least 85%, at least 90%, at least 91%, at least 92%, at least 93%, at least 94%, at least 95%, at least 96%, at least 97%, at least 98%, at least 99% or 100% identity to SEQ ID NO:174. In some preferred aspects, VH1, VH2, VH3, VH4, VL1, VL2, VL3 and VL4 have at least 90% identity with the corresponding amino acid sequences specified above. As used herein, “at least 90% identity” includes at least 91%, 92%, 93%, 94%, 95%, 96%, 97%, 98%, 99% and 100% identity to the recited reference sequence. In some particularly preferred aspects, VH1, VH2, VH3, VH4, VL1, VL2, VL3 and VL4 comprise or consist of the corresponding amino acid sequences specified above.

[0505] In some aspects, VH1 of an antigen binding polypeptide or antigen binding polypeptide complex provided herein comprises an amino acid sequence having at least 80%, at least 85%, at least 90%, at least 91%, at least 92%, at least 93%, at least 94%, at least 95%, at least 96%, at least 97%, at least 98%, at least 99% or 100% identity to SEQ ID NO:58; VH2 comprises an amino acid sequence having at least 80%, at least 85%, at least 90%, at least 91%, at least 92%, at least 93%, at least 94%, at least 95%, at least 96%, at least 97%, at least 98%, at least 99% or 100% identity to SEQ ID NO:170; VH3 comprises an amino acid sequence having at least 80%, at least 85%, at least 90%, at least 91%, at least 92%, at least 93%, at least 94%, at least 95%, at least 96%, at least 97%, at least 98%, at least 99% or 100% identity to SEQ ID NO:170; VH4 comprises an amino acid sequence having at least 80%, at least 85%, at least 90%, at least 91%, at least 92%, at least 93%, at least 94%, at least 95%, at least 96%, at least 97%, at least 98%, at least 99% or 100% identity to SEQ ID NO:66; VL1 comprises an amino acid sequence having at least 80%, at least 85%, at least 90%, at least 91%, at least 92%, at least 93%, at least 94%, at least 95%, at least 96%, at least 97%, at least 98%, at least 99% or 100% identity to SEQ ID NO:54; VL2 comprises an amino acid sequence having at least 80%, at least 85%, at least 90%, at least 91%, at least 92%, at least 93%, at least 94%, at least 95%, at least 96%, at least 97%, at least 98%, at least 99% or 100% identity to SEQ ID NO:166; VL3 comprises an amino acid sequence having at least 80%, at least 85%, at least 90%, at least 91%, at least 92%, at least 93%, at least 94%, at least 95%, at least 96%, at least 97%, at least 98%, at least 99% or 100% identity to SEQ ID NO:166; and VL4 comprises an amino acid sequence having at least 80%, at least 85%, at least 90%, at least 91%, at least 92%, at least 93%, at least 94%, at least 95%, at least 96%, at least 97%, at least 98%, at least 99% or 100% identity to SEQ ID NO:62. In some preferred aspects, VH1, VH2, VH3, VH4, VL1, VL2, VL3 and VL4 have at least 90% identity with the corresponding amino acid sequences specified above. As used herein, “at least 90% identity” includes at least 91%, 92%, 93%, 94%, 95%, 96%, 97%, 98%, 99% and 100% identity to the recited reference sequence. In some particularly preferred aspects, VH1, VH2, VH3, VH4, VL1, VL2, VL3 and VL4 comprise or consist of the corresponding amino acid sequences specified above.

[0506] In some aspects, VH1 of an antigen binding polypeptide or antigen binding polypeptide complex provided herein comprises an amino acid sequence having at least 80%, at least 85%, at least 90%, at least 91%, at least 92%, at least 93%, at least 94%, at least 95%, at least 96%, at least 97%, at least 98%, at least 99% or 100% identity to SEQ ID NO:58; VH2 comprises an amino acid sequence having at least 80%, at least 85%, at least 90%, at least 91%, at least 92%, at least 93%, at least 94%, at least 95%, at least 96%, at least 97%, at least 98%, at least 99% or 100% identity to SEQ ID NO:170; VH3 comprises an amino acid sequence having at least 80%, at least 85%, at least 90%, at least 91%, at least 92%, at least 93%, at least 94%, at least 95%, at least 96%, at least 97%, at least 98%, at least 99% or 100% identity to SEQ ID NO:66; VH4 comprises an amino acid sequence having at least 80%, at least 85%, at least 90%, at least 91%, at least 92%, at least 93%, at least 94%, at least 95%, at least 96%, at least 97%, at least 98%, at least 99% or 100% identity to SEQ ID NO:170; VL1 comprises an amino acid sequence having at least 80%, at least 85%, at least 90%, at least 91%, at least 92%, at least 93%, at least 94%, at least 95%, at least 96%, at least 97%, at least 98%, at least 99% or 100% identity to SEQ ID NO:54; VL2 comprises an amino acid sequence having at least 80%, at least 85%, at least 90%, at least 91%, at least 92%, at least 93%, at least 94%, at least 95%, at least 96%, at least 97%, at least 98%, at least 99% or 100% identity to SEQ ID NO:166; VL3 comprises an amino acid sequence having at least 80%, at least 85%, at least 90%, at least 91%, at least 92%, at least 93%, at least 94%, at least 95%, at least 96%, at least 97%, at least 98%, at least 99% or 100% identity to SEQ ID NO:62; and VL4 comprises an amino acid sequence having at least 80%, at least 85%, at least 90%, at least 91%, at least 92%, at least 93%, at least 94%, at least 95%, at least 96%, at least 97%, at least 98%, at least 99% or 100% identity to SEQ ID NO:166. In some preferred aspects, VH1, VH2, VH3, VH4, VL1, VL2, VL3 and VL4 have at least 90% identity with the corresponding amino acid sequences specified above. As used herein, “at least 90% identity” includes at least 91%, 92%, 93%, 94%, 95%, 96%, 97%, 98%, 99% and 100% identity to the recited reference sequence. In some particularly preferred aspects, VH1, VH2, VH3, VH4, VL1, VL2, VL3 and VL4 comprise or consist of the corresponding amino acid sequences specified above.

[0507] In some aspects, VH1 of an antigen binding polypeptide or antigen binding polypeptide complex provided herein comprises an amino acid sequence having at least 80%, at least 85%, at least 90%, at least 91%, at least 92%, at least 93%, at least 94%, at least 95%, at least 96%, at least 97%, at least 98%, at least 99% or 100% identity to SEQ ID NO:182; and/or VH2 comprises an amino acid sequence having at least 80%, at least 85%, at least 90%, at least 91%, at least 92%, at least 93%, at least 94%, at least 95%, at least 96%, at least 97%, at least 98%, at least 99% or 100% identity to SEQ ID NO:182; and/or VH3 comprises an amino acid sequence having at least 80%, at least 85%, at least 90%, at least 91%, at least 92%, at least 93%, at least 94%, at least 95%, at least 96%, at least 97%, at least 98%, at least 99% or 100% identity to SEQ ID NO:182; and/or VH4 comprises an amino acid sequence having at least 80%, at least 85%, at least 90%, at least 91%, at least 92%, at least 93%, at least 94%, at least 95%, at least 96%, at least 97%, at least 98%, at least 99% or 100% identity to SEQ ID NO:182; and/or VL1 comprises an amino acid sequence having at least 80%, at least 85%, at least 90%, at least 91%, at least 92%, at least 93%, at least 94%, at least 95%, at least 96%, at least 97%, at least 98%, at least 99% or 100% identity to SEQ ID NO:186; and/or VL2 comprises an amino acid sequence having at least 80%, at least 85%, at least 90%, at least 91%, at least 92%, at least 93%, at least 94%, at least 95%, at least 96%, at least 97%, at least 98%, at least 99% or 100% identity to SEQ ID NO:186; and/or VL3 comprises an amino acid sequence having at least 80%, at least 85%, at least 90%, at least 91%, at least 92%, at least 93%, at least 94%, at least 95%, at least 96%, at least 97%, at least 98%, at least 99% or 100% identity to SEQ ID NO:186; and/or VL4 comprises an amino acid sequence having at least 80%, at least 85%, at least 90%, at least 91%, at least 92%, at least 93%, at least 94%, at least 95%, at least 96%, at least 97%, at least 98%, at least 99% or 100% identity to SEQ ID NO:186. In some preferred aspects, VH1, VH2, VH3, VH4, VL1, VL2, VL3 and VL4 have at least 90% identity with the corresponding amino acid sequences specified above. As used herein, “at least 90% identity” includes at least 91%, 92%, 93%, 94%, 95%, 96%, 97%, 98%, 99% and 100% identity to the recited reference sequence. In some particularly preferred aspects, VH1, VH2, VH3, VH4, VL1, VL2, VL3 and VL4 comprise or consist of the corresponding amino acid sequences specified above.

[0508] In some aspects, VH1 of an antigen binding polypeptide or antigen binding polypeptide complex provided herein comprises an amino acid sequence having at least 80%, at least 85%, at least 90%, at least 91%, at least 92%, at least 93%, at least 94%, at least 95%, at least 96%, at least 97%, at least 98%, at least 99% or 100% identity to SEQ ID NO:182; VH2 comprises an amino acid sequence having at least 80%, at least 85%, at least 90%, at least 91%, at least 92%, at least 93%, at least 94%, at least 95%, at least 96%, at least 97%, at least 98%, at least 99% or 100% identity to SEQ ID NO:178; VH3 comprises an amino acid sequence having at least 80%, at least 85%, at least 90%, at least 91%, at least 92%, at least 93%, at least 94%, at least 95%, at least 96%, at least 97%, at least 98%, at least 99% or 100% identity to SEQ ID NO:178; VH4 comprises an amino acid sequence having at least 80%, at least 85%, at least 90%, at least 91%, at least 92%, at least 93%, at least 94%, at least 95%, at least 96%, at least 97%, at least 98%, at least 99% or 100% identity to SEQ ID NO:182; VL1 comprises an amino acid sequence having at least 80%, at least 85%, at least 90%, at least 91%, at least 92%, at least 93%, at least 94%, at least 95%, at least 96%, at least 97%, at least 98%, at least 99% or 100% identity to SEQ ID NO:186; VL2 comprises an amino acid sequence having at least 80%, at least 85%, at least 90%, at least 91%, at least 92%, at least 93%, at least 94%, at least 95%, at least 96%, at least 97%, at least 98%, at least 99% or 100% identity to SEQ ID NO:174; VL3 comprises an amino acid sequence having at least 80%, at least 85%, at least 90%, at least 91%, at least 92%, at least 93%, at least 94%, at least 95%, at least 96%, at least 97%, at least 98%, at least 99% or 100% identity to SEQ ID NO:174; and VL4 comprises an amino acid sequence having at least 80%, at least 85%, at least 90%, at least 91%, at least 92%, at least 93%, at least 94%, at least 95%, at least 96%, at least 97%, at least 98%, at least 99% or 100% identity to SEQ ID NO:186. In some preferred aspects, VH1, VH2, VH3, VH4, VL1, VL2, VL3 and VL4 have at least 90% identity with the corresponding amino acid sequences specified above. As used herein, “at least 90% identity” includes at least 91%, 92%, 93%, 94%, 95%, 96%, 97%, 98%, 99% and 100% identity to the recited reference sequence. In some particularly preferred aspects, VH1, VH2, VH3, VH4, VL1, VL2, VL3 and VL4 comprise or consist of the corresponding amino acid sequences specified above.

[0509] In some aspects, VH1 of an antigen binding polypeptide or antigen binding polypeptide complex provided herein comprises an amino acid sequence having at least 80%, at least 85%, at least 90%, at least 91%, at least 92%, at least 93%, at least 94%, at least 95%, at least 96%, at least 97%, at least 98%, at least 99% or 100% identity to SEQ ID NO:182; VH2 comprises an amino acid sequence having at least 80%, at least 85%, at least 90%, at least 91%, at least 92%, at least 93%, at least 94%, at least 95%, at least 96%, at least 97%, at least 98%, at least 99% or 100% identity to SEQ ID NO:170; VH3 comprises an amino acid sequence having at least 80%, at least 85%, at least 90%, at least 91%, at least 92%, at least 93%, at least 94%, at least 95%, at least 96%, at least 97%, at least 98%, at least 99% or 100% identity to SEQ ID NO:170; VH4 comprises an amino acid sequence having at least 80%, at least 85%, at least 90%, at least 91%, at least 92%, at least 93%, at least 94%, at least 95%, at least 96%, at least 97%, at least 98%, at least 99% or 100% identity to SEQ ID NO:182; VL1 comprises an amino acid sequence having at least 80%, at least 85%, at least 90%, at least 91%, at least 92%, at least 93%, at least 94%, at least 95%, at least 96%, at least 97%, at least 98%, at least 99% or 100% identity to SEQ ID NO:186; VL2 comprises an amino acid sequence having at least 80%, at least 85%, at least 90%, at least 91%, at least 92%, at least 93%, at least 94%, at least 95%, at least 96%, at least 97%, at least 98%, at least 99% or 100% identity to SEQ ID NO:166; VL3 comprises an amino acid sequence having at least 80%, at least 85%, at least 90%, at least 91%, at least 92%, at least 93%, at least 94%, at least 95%, at least 96%, at least 97%, at least 98%, at least 99% or 100% identity to SEQ ID NO:166; and VL4 comprises an amino acid sequence having at least 80%, at least 85%, at least 90%, at least 91%, at least 92%, at least 93%, at least 94%, at least 95%, at least 96%, at least 97%, at least 98%, at least 99% or 100% identity to SEQ ID NO:186. In some preferred aspects, VH1, VH2, VH3, VH4, VL1, VL2, VL3 and VL4 have at least 90% identity with the corresponding amino acid sequences specified above. As used herein, “at least 90% identity” includes at least 91%, 92%, 93%, 94%, 95%, 96%, 97%, 98%, 99% and 100% identity to the recited reference sequence. In some particularly preferred aspects, VH1, VH2, VH3, VH4, VL1, VL2, VL3 and VL4 comprise or consist of the corresponding amino acid sequences specified above.

[0510] In some aspects, an antigen binding polypeptide complex provided herein comprises a first polypeptide having at least 80%, at least 85%, at least 90%, at least 91%, at least 92%, at least 93%, at least 94%, at least 95%, at least 96%, at least 97%, at least 98%, at least 99% or 100% identity to SEQ ID NO:190, and a second polypeptide having at least 80%, at least 85%, at least 90%, at least 91%, at least 92%, at least 93%, at least 94%, at least 95%, at least 96%, at least 97%, at least 98%, at least 99% or 100% identity to SEQ ID NO:190. In some preferred aspects, the first polypeptide and second polypeptide have at least 90% identity with the corresponding amino acid sequences specified above. As used herein, “at least 90% identity” includes at least 91%, 92%, 93%, 94%, 95%, 96%, 97%, 98%, 99% and 100% identity to the recited reference sequence. In some particularly preferred aspects, the first polypeptide and second polypeptide comprise or consist of the corresponding amino acid sequences specified above.

[0511] In some aspects, an antigen binding polypeptide complex provided herein comprises a first polypeptide having at least 80%, at least 85%, at least 90%, at least 91%, at least 92%, at least 93%, at least 94%, at least 95%, at least 96%, at least 97%, at least 98%, at least 99% or 100% identity to SEQ ID NO:191, and a second polypeptide having at least 80%, at least 85%, at least 90%, at least 91%, at least 92%, at least 93%, at least 94%, at least 95%, at least 96%, at least 97%, at least 98%, at least 99% or 100% identity to SEQ ID NO:191. In some preferred aspects, the first polypeptide and second polypeptide have at least 90% identity with the corresponding amino acid sequences specified above. As used herein, “at least 90% identity” includes at least 91%, 92%, 93%, 94%, 95%, 96%, 97%, 98%, 99% and 100% identity to the recited reference sequence. In some particularly preferred aspects, the first polypeptide and second polypeptide comprise or consist of the corresponding amino acid sequences specified above.

[0512] In some aspects, an antigen binding polypeptide complex provided herein comprises a first polypeptide having at least 80%, at least 85%, at least 90%, at least 91%, at least 92%, at least 93%, at least 94%, at least 95%, at least 96%, at least 97%, at least 98%, at least 99% or 100% identity to SEQ ID NO:192, and a second polypeptide having at least 80%, at least 85%, at least 90%, at least 91%, at least 92%, at least 93%, at least 94%, at least 95%, at least 96%, at least 97%, at least 98%, at least 99% or 100% identity to SEQ ID NO:192. In some preferred aspects, the first polypeptide and second polypeptide have at least 90% identity with the corresponding amino acid sequences specified above. As used herein, “at least 90% identity” includes at least 91%, 92%, 93%, 94%, 95%, 96%, 97%, 98%, 99% and 100% identity to the recited reference sequence. In some particularly preferred aspects, the first polypeptide and second polypeptide comprise or consist of the corresponding amino acid sequences specified above.

[0513] In some aspects, an antigen binding polypeptide complex provided herein comprises a first polypeptide having at least 80%, at least 85%, at least 90%, at least 91%, at least 92%, at least 93%, at least 94%, at least 95%, at least 96%, at least 97%, at least 98%, at least 99% or 100% identity to SEQ ID NO:193, and a second polypeptide having at least 80%, at least 85%, at least 90%, at least 91%, at least 92%, at least 93%, at least 94%, at least 95%, at least 96%, at least 97%, at least 98%, at least 99% or 100% identity to SEQ ID NO:193. In some preferred aspects, the first polypeptide and second polypeptide have at least 90% identity with the corresponding amino acid sequences specified above. As used herein, “at least 90% identity” includes at least 91%, 92%, 93%, 94%, 95%, 96%, 97%, 98%, 99% and 100% identity to the recited reference sequence. In some particularly preferred aspects, the first polypeptide and second polypeptide comprise or consist of the corresponding amino acid sequences specified above.

[0514] In some aspects, an antigen binding polypeptide complex provided herein comprises a first polypeptide having at least 80%, at least 85%, at least 90%, at least 91%, at least 92%, at least 93%, at least 94%, at least 95%, at least 96%, at least 97%, at least 98%, at least 99% or 100% identity to SEQ ID NO:194, and a second polypeptide having at least 80%, at least 85%, at least 90%, at least 91%, at least 92%, at least 93%, at least 94%, at least 95%, at least 96%, at least 97%, at least 98%, at least 99% or 100% identity to SEQ ID NO:195. In some preferred aspects, the first polypeptide and second polypeptide have at least 90% identity with the corresponding amino acid sequences specified above. As used herein, “at least 90% identity” includes at least 91%, 92%, 93%, 94%, 95%, 96%, 97%, 98%, 99% and 100% identity to the recited reference sequence. In some particularly preferred aspects, the first polypeptide and second polypeptide comprise or consist of the corresponding amino acid sequences specified above.

[0515] In some aspects, an antigen binding polypeptide complex provided herein comprises a first polypeptide having at least 80%, at least 85%, at least 90%, at least 91%, at least 92%, at least 93%, at least 94%, at least 95%, at least 96%, at least 97%, at least 98%, at least 99% or 100% identity to SEQ ID NO:196, and a second polypeptide having at least 80%, at least 85%, at least 90%, at least 91%, at least 92%, at least 93%, at least 94%, at least 95%, at least 96%, at least 97%, at least 98%, at least 99% or 100% identity to SEQ ID NO:197. In some preferred aspects, the first polypeptide and second polypeptide have at least 90% identity with the corresponding amino acid sequences specified above. As used herein, “at least 90% identity” includes at least 91%, 92%, 93%, 94%, 95%, 96%, 97%, 98%, 99% and 100% identity to the recited reference sequence. In some particularly preferred aspects, the first polypeptide and second polypeptide comprise or consist of the corresponding amino acid sequences specified above.

[0516] In some aspects, an antigen binding polypeptide complex provided herein comprises a first polypeptide having at least 80%, at least 85%, at least 90%, at least 91%, at least 92%, at least 93%, at least 94%, at least 95%, at least 96%, at least 97%, at least 98%, at least 99% or 100% identity to SEQ ID NO:198, and a second polypeptide having at least 80%, at least 85%, at least 90%, at least 91%, at least 92%, at least 93%, at least 94%, at least 95%, at least 96%, at least 97%, at least 98%, at least 99% or 100% identity to SEQ ID NO:199. In some preferred aspects, the first polypeptide and second polypeptide have at least 90% identity with the corresponding amino acid sequences specified above. As used herein, “at least 90% identity” includes at least 91%, 92%, 93%, 94%, 95%, 96%, 97%, 98%, 99% and 100% identity to the recited reference sequence. In some particularly preferred aspects, the first polypeptide and second polypeptide comprise or consist of the corresponding amino acid sequences specified above.

[0517] In some aspects, an antigen binding polypeptide complex provided herein comprises a first polypeptide having at least 80%, at least 85%, at least 90%, at least 91%, at least 92%, at least 93%, at least 94%, at least 95%, at least 96%, at least 97%, at least 98%, at least 99% or 100% identity to SEQ ID NO:200, and a second polypeptide having at least 80%, at least 85%, at least 90%, at least 91%, at least 92%, at least 93%, at least 94%, at least 95%, at least 96%, at least 97%, at least 98%, at least 99% or 100% identity to SEQ ID NO:201. In some preferred aspects, the first polypeptide and second polypeptide have at least 90% identity with the corresponding amino acid sequences specified above. As used herein, “at least 90% identity” includes at least 91%, 92%, 93%, 94%, 95%, 96%, 97%, 98%, 99% and 100% identity to the recited reference sequence. In some particularly preferred aspects, the first polypeptide and second polypeptide comprise or consist of the corresponding amino acid sequences specified above.

[0518] In some aspects, an antigen binding polypeptide or antigen binding polypeptide complex provided herein comprises a polypeptide having at least 80%, at least 85%, at least 90%, at least 91%, at least 92%, at least 93%, at least 94%, at least 95%, at least 96%, at least 97%, at least 98%, at least 99% or 100% identity to any one of SEQ ID NOs:202-258, 291, 295, 297, 299, 301, 303, 305, 307, 309, 311, 313, 315, 317, 319, 321, 323, 325, 327, 329, 331, 333, 335, 337, 339, 341, 343, 345, 347, 349, 351, 353, 355, 357, 359, 361, 363, 365, 367, 369, 371, 373, 375, 377, 379, 381, 383, 385, 387, 389, 391, 395, 397, 399, 401, 403, 405, 407, 409, 411, 413, 415, 417, 419, 421, 423, 425, 427, 429, 431, 433, 435, 437, 439, 441, 443, 445, 447, 449, 451, 453, 455, 457, 459, 461, 463, 465, 467, 469, 471, 473, 475, 477, 479, 481, 483, 485, 487, 489, 491, 493, 495, 497, 499, 501, 503, 505 and 711-754. In some aspects, an antigen binding polypeptide complex provided herein comprises a first polypeptide having at least 80%, at least 85%, at least 90%, at least 91%, at least 92%, at least 93%, at least 94%, at least 95%, at least 96%, at least 97%, at least 98%, at least 99% or 100% identity to any one of SEQ ID NOs:202-258, 291, 295, 297, 299, 301, 303, 305, 307, 309, 311, 313, 315, 317, 319, 321, 323, 325, 327, 329, 331, 333, 335, 337, 339, 341, 343, 345, 347, 349, 351, 353, 355, 357, 359, 361, 363, 365, 367, 369, 371, 373, 375, 377, 379, 381, 383, 385, 387, 389, 391, 395, 397, 399, 401, 403, 405, 407, 409, 411, 413, 415, 417, 419, 421, 423, 425, 427, 429, 431, 433, 435, 437, 439, 441, 443, 445, 447, 449, 451, 453, 455, 457, 459, 461, 463, 465, 467, 469, 471, 473, 475, 477, 479, 481, 483, 485, 487, 489, 491, 493, 495, 497, 499, 501, 503, 505 and 711-754, and a second polypeptide having at least 80%, at least 85%, at least 90%, at least 91%, at least 92%, at least 93%, at least 94%, at least 95%, at least 96%, at least 97%, at least 98%, at least 99% or 100% identity to any one of SEQ ID NOs:202-258, 291, 295, 297, 299, 301, 303, 305, 307, 309, 311, 313, 315, 317, 319, 321, 323, 325, 327, 329, 331, 333, 335, 337, 339, 341, 343, 345, 347, 349, 351, 353, 355, 357, 359, 361, 363, 365, 367, 369, 371, 373, 375, 377, 379, 381, 383, 385, 387, 389, 391, 395, 397, 399, 401, 403, 405, 407, 409, 411, 413, 415, 417, 419, 421, 423, 425, 427, 429, 431, 433, 435, 437, 439, 441, 443, 445, 447, 449, 451, 453, 455, 457, 459, 461, 463, 465, 467, 469, 471, 473, 475, 477, 479, 481, 483, 485, 487, 489, 491, 493, 495, 497, 499, 501, 503, 505 and 711-754. In some preferred aspects, the first polypeptide and second polypeptide have at least 90% identity with a corresponding amino acid sequence specified above. As used herein, “at least 90% identity” includes at least 91%, 92%, 93%, 94%, 95%, 96%, 97%, 98%, 99% and 100% identity to the recited reference sequence. In some particularly preferred aspects, the first polypeptide and second polypeptide comprise or consist of a corresponding amino acid sequence specified above.

[0519] In some aspects, an antigen binding polypeptide complex provided herein comprises a first polypeptide having at least 80%, at least 85%, at least 90%, at least 91%, at least 92%, at least 93%, at least 94%, at least 95%, at least 96%, at least 97%, at least 98%, at least 99% or 100% identity to SEQ ID NO:202, and a second polypeptide having at least 80%, at least 85%, at least 90%, at least 91%, at least 92%, at least 93%, at least 94%, at least 95%, at least 96%, at least 97%, at least 98%, at least 99% or 100% identity to SEQ ID NO:202. In some preferred aspects, the first polypeptide and second polypeptide have at least 90% identity with the corresponding amino acid sequences specified above. As used herein, “at least 90% identity” includes at least 91%, 92%, 93%, 94%, 95%, 96%, 97%, 98%, 99% and 100% identity to the recited reference sequence. In some particularly preferred aspects, the first polypeptide and second polypeptide comprise or consist of the corresponding amino acid sequences specified above.

[0520] In some aspects, an antigen binding polypeptide complex provided herein comprises a first polypeptide having at least 80%, at least 85%, at least 90%, at least 91%, at least 92%, at least 93%, at least 94%, at least 95%, at least 96%, at least 97%, at least 98%, at least 99% or 100% identity to SEQ ID NO:203, and a second polypeptide having at least 80%, at least 85%, at least 90%, at least 91%, at least 92%, at least 93%, at least 94%, at least 95%, at least 96%, at least 97%, at least 98%, at least 99% or 100% identity to SEQ ID NO:203. In some preferred aspects, the first polypeptide and second polypeptide have at least 90% identity with the corresponding amino acid sequences specified above. As used herein, “at least 90% identity” includes at least 91%, 92%, 93%, 94%, 95%, 96%, 97%, 98%, 99% and 100% identity to the recited reference sequence. In some particularly preferred aspects, the first polypeptide and second polypeptide comprise or consist of the corresponding amino acid sequences specified above.

[0521] In some aspects, an antigen binding polypeptide complex provided herein comprises a first polypeptide having at least 80%, at least 85%, at least 90%, at least 91%, at least 92%, at least 93%, at least 94%, at least 95%, at least 96%, at least 97%, at least 98%, at least 99% or 100% identity to SEQ ID NO:204, and a second polypeptide having at least 80%, at least 85%, at least 90%, at least 91%, at least 92%, at least 93%, at least 94%, at least 95%, at least 96%, at least 97%, at least 98%, at least 99% or 100% identity to SEQ ID NO:204. In some preferred aspects, the first polypeptide and second polypeptide have at least 90% identity with the corresponding amino acid sequences specified above. As used herein, “at least 90% identity” includes at least 91%, 92%, 93%, 94%, 95%, 96%, 97%, 98%, 99% and 100% identity to the recited reference sequence. In some particularly preferred aspects, the first polypeptide and second polypeptide comprise or consist of the corresponding amino acid sequences specified above.

[0522] In some aspects, an antigen binding polypeptide complex provided herein comprises a first polypeptide having at least 80%, at least 85%, at least 90%, at least 91%, at least 92%, at least 93%, at least 94%, at least 95%, at least 96%, at least 97%, at least 98%, at least 99% or 100% identity to SEQ ID NO:205, and a second polypeptide having at least 80%, at least 85%, at least 90%, at least 91%, at least 92%, at least 93%, at least 94%, at least 95%, at least 96%, at least 97%, at least 98%, at least 99% or 100% identity to SEQ ID NO:205. In some preferred aspects, the first polypeptide and second polypeptide have at least 90% identity with the corresponding amino acid sequences specified above. As used herein, “at least 90% identity” includes at least 91%, 92%, 93%, 94%, 95%, 96%, 97%, 98%, 99% and 100% identity to the recited reference sequence. In some particularly preferred aspects, the first polypeptide and second polypeptide comprise or consist of the corresponding amino acid sequences specified above.

[0523] In some aspects, an antigen binding polypeptide complex provided herein comprises a first polypeptide having at least 80%, at least 85%, at least 90%, at least 91%, at least 92%, at least 93%, at least 94%, at least 95%, at least 96%, at least 97%, at least 98%, at least 99% or 100% identity to SEQ ID NO:206, and a second polypeptide having at least 80%, at least 85%, at least 90%, at least 91%, at least 92%, at least 93%, at least 94%, at least 95%, at least 96%, at least 97%, at least 98%, at least 99% or 100% identity to SEQ ID NO:206. In some preferred aspects, the first polypeptide and second polypeptide have at least 90% identity with the corresponding amino acid sequences specified above. As used herein, “at least 90% identity” includes at least 91%, 92%, 93%, 94%, 95%, 96%, 97%, 98%, 99% and 100% identity to the recited reference sequence. In some particularly preferred aspects, the first polypeptide and second polypeptide comprise or consist of the corresponding amino acid sequences specified above.

[0524] In some aspects, an antigen binding polypeptide complex provided herein comprises a first polypeptide having at least 80%, at least 85%, at least 90%, at least 91%, at least 92%, at least 93%, at least 94%, at least 95%, at least 96%, at least 97%, at least 98%, at least 99% or 100% identity to SEQ ID NO:207, and a second polypeptide having at least 80%, at least 85%, at least 90%, at least 91%, at least 92%, at least 93%, at least 94%, at least 95%, at least 96%, at least 97%, at least 98%, at least 99% or 100% identity to SEQ ID NO:208. In some preferred aspects, the first polypeptide and second polypeptide have at least 90% identity with the corresponding amino acid sequences specified above. As used herein, “at least 90% identity” includes at least 91%, 92%, 93%, 94%, 95%, 96%, 97%, 98%, 99% and 100% identity to the recited reference sequence. In some particularly preferred aspects, the first polypeptide and second polypeptide comprise or consist of the corresponding amino acid sequences specified above.

[0525] In some aspects, an antigen binding polypeptide complex provided herein comprises a first polypeptide having at least 80%, at least 85%, at least 90%, at least 91%, at least 92%, at least 93%, at least 94%, at least 95%, at least 96%, at least 97%, at least 98%, at least 99% or 100% identity to SEQ ID NO:209, and a second polypeptide having at least 80%, at least 85%, at least 90%, at least 91%, at least 92%, at least 93%, at least 94%, at least 95%, at least 96%, at least 97%, at least 98%, at least 99% or 100% identity to SEQ ID NO:209. In some preferred aspects, the first polypeptide and second polypeptide have at least 90% identity with the corresponding amino acid sequences specified above. As used herein, “at least 90% identity” includes at least 91%, 92%, 93%, 94%, 95%, 96%, 97%, 98%, 99% and 100% identity to the recited reference sequence. In some particularly preferred aspects, the first polypeptide and second polypeptide comprise or consist of the corresponding amino acid sequences specified above.

[0526] In some aspects, an antigen binding polypeptide complex provided herein comprises a first polypeptide having at least 80%, at least 85%, at least 90%, at least 91%, at least 92%, at least 93%, at least 94%, at least 95%, at least 96%, at least 97%, at least 98%, at least 99% or 100% identity to SEQ ID NO:210, and a second polypeptide having at least 80%, at least 85%, at least 90%, at least 91%, at least 92%, at least 93%, at least 94%, at least 95%, at least 96%, at least 97%, at least 98%, at least 99% or 100% identity to SEQ ID NO:211. In some preferred aspects, the first polypeptide and second polypeptide have at least 90% identity with the corresponding amino acid sequences specified above. As used herein, “at least 90% identity” includes at least 91%, 92%, 93%, 94%, 95%, 96%, 97%, 98%, 99% and 100% identity to the recited reference sequence. In some particularly preferred aspects, the first polypeptide and second polypeptide comprise or consist of the corresponding amino acid sequences specified above.

[0527] In some aspects, an antigen binding polypeptide complex provided herein comprises a first polypeptide having at least 80%, at least 85%, at least 90%, at least 91%, at least 92%, at least 93%, at least 94%, at least 95%, at least 96%, at least 97%, at least 98%, at least 99% or 100% identity to SEQ ID NO:212, and a second polypeptide having at least 80%, at least 85%, at least 90%, at least 91%, at least 92%, at least 93%, at least 94%, at least 95%, at least 96%, at least 97%, at least 98%, at least 99% or 100% identity to SEQ ID NO:213. In some preferred aspects, the first polypeptide and second polypeptide have at least 90% identity with the corresponding amino acid sequences specified above. As used herein, “at least 90% identity” includes at least 91%, 92%, 93%, 94%, 95%, 96%, 97%, 98%, 99% and 100% identity to the recited reference sequence. In some particularly preferred aspects, the first polypeptide and second polypeptide comprise or consist of the corresponding amino acid sequences specified above.

[0528] In some aspects, an antigen binding polypeptide complex provided herein comprises a first polypeptide having at least 80%, at least 85%, at least 90%, at least 91%, at least 92%, at least 93%, at least 94%, at least 95%, at least 96%, at least 97%, at least 98%, at least 99% or 100% identity to SEQ ID NO:214, and a second polypeptide having at least 80%, at least 85%, at least 90%, at least 91%, at least 92%, at least 93%, at least 94%, at least 95%, at least 96%, at least 97%, at least 98%, at least 99% or 100% identity to SEQ ID NO:215. In some preferred aspects, the first polypeptide and second polypeptide have at least 90% identity with the corresponding amino acid sequences specified above. As used herein, “at least 90% identity” includes at least 91%, 92%, 93%, 94%, 95%, 96%, 97%, 98%, 99% and 100% identity to the recited reference sequence. In some particularly preferred aspects, the first polypeptide and second polypeptide comprise or consist of the corresponding amino acid sequences specified above.

[0529] In some aspects, an antigen binding polypeptide complex provided herein comprises a first polypeptide having at least 80%, at least 85%, at least 90%, at least 91%, at least 92%, at least 93%, at least 94%, at least 95%, at least 96%, at least 97%, at least 98%, at least 99% or 100% identity to SEQ ID NO:216, and a second polypeptide having at least 80%, at least 85%, at least 90%, at least 91%, at least 92%, at least 93%, at least 94%, at least 95%, at least 96%, at least 97%, at least 98%, at least 99% or 100% identity to SEQ ID NO:217. In some preferred aspects, the first polypeptide and second polypeptide have at least 90% identity with the corresponding amino acid sequences specified above. As used herein, “at least 90% identity” includes at least 91%, 92%, 93%, 94%, 95%, 96%, 97%, 98%, 99% and 100% identity to the recited reference sequence. In some particularly preferred aspects, the first polypeptide and second polypeptide comprise or consist of the corresponding amino acid sequences specified above.

[0530] In some aspects, an antigen binding polypeptide complex provided herein comprises a first polypeptide having at least 80%, at least 85%, at least 90%, at least 91%, at least 92%, at least 93%, at least 94%, at least 95%, at least 96%, at least 97%, at least 98%, at least 99% or 100% identity to SEQ ID NO:218, and a second polypeptide having at least 80%, at least 85%, at least 90%, at least 91%, at least 92%, at least 93%, at least 94%, at least 95%, at least 96%, at least 97%, at least 98%, at least 99% or 100% identity to SEQ ID NO:219. In some preferred aspects, the first polypeptide and second polypeptide have at least 90% identity with the corresponding amino acid sequences specified above. As used herein, “at least 90% identity” includes at least 91%, 92%, 93%, 94%, 95%, 96%, 97%, 98%, 99% and 100% identity to the recited reference sequence. In some particularly preferred aspects, the first polypeptide and second polypeptide comprise or consist of the corresponding amino acid sequences specified above.

[0531] In some aspects, an antigen binding polypeptide complex provided herein comprises a first polypeptide having at least 80%, at least 85%, at least 90%, at least 91%, at least 92%, at least 93%, at least 94%, at least 95%, at least 96%, at least 97%, at least 98%, at least 99% or 100% identity to SEQ ID NO:220, and a second polypeptide having at least 80%, at least 85%, at least 90%, at least 91%, at least 92%, at least 93%, at least 94%, at least 95%, at least 96%, at least 97%, at least 98%, at least 99% or 100% identity to SEQ ID NO:221. In some preferred aspects, the first polypeptide and second polypeptide have at least 90% identity with the corresponding amino acid sequences specified above. As used herein, “at least 90% identity” includes at least 91%, 92%, 93%, 94%, 95%, 96%, 97%, 98%, 99% and 100% identity to the recited reference sequence. In some particularly preferred aspects, the first polypeptide and second polypeptide comprise or consist of the corresponding amino acid sequences specified above.

[0532] In some aspects, an antigen binding polypeptide complex provided herein comprises a first polypeptide having at least 80%, at least 85%, at least 90%, at least 91%, at least 92%, at least 93%, at least 94%, at least 95%, at least 96%, at least 97%, at least 98%, at least 99% or 100% identity to SEQ ID NO:222, and a second polypeptide having at least 80%, at least 85%, at least 90%, at least 91%, at least 92%, at least 93%, at least 94%, at least 95%, at least 96%, at least 97%, at least 98%, at least 99% or 100% identity to SEQ ID NO:223. In some preferred aspects, the first polypeptide and second polypeptide have at least 90% identity with the corresponding amino acid sequences specified above. As used herein, “at least 90% identity” includes at least 91%, 92%, 93%, 94%, 95%, 96%, 97%, 98%, 99% and 100% identity to the recited reference sequence. In some particularly preferred aspects, the first polypeptide and second polypeptide comprise or consist of the corresponding amino acid sequences specified above.

[0533] In some aspects, an antigen binding polypeptide complex provided herein comprises a first polypeptide having at least 80%, at least 85%, at least 90%, at least 91%, at least 92%, at least 93%, at least 94%, at least 95%, at least 96%, at least 97%, at least 98%, at least 99% or 100% identity to SEQ ID NO:224, and a second polypeptide having at least 80%, at least 85%, at least 90%, at least 91%, at least 92%, at least 93%, at least 94%, at least 95%, at least 96%, at least 97%, at least 98%, at least 99% or 100% identity to SEQ ID NO:225. In some preferred aspects, the first polypeptide and second polypeptide have at least 90% identity with the corresponding amino acid sequences specified above. As used herein, “at least 90% identity” includes at least 91%, 92%, 93%, 94%, 95%, 96%, 97%, 98%, 99% and 100% identity to the recited reference sequence. In some particularly preferred aspects, the first polypeptide and second polypeptide comprise or consist of the corresponding amino acid sequences specified above.

[0534] In some aspects, an antigen binding polypeptide complex provided herein comprises a first polypeptide having at least 80%, at least 85%, at least 90%, at least 91%, at least 92%, at least 93%, at least 94%, at least 95%, at least 96%, at least 97%, at least 98%, at least 99% or 100% identity to SEQ ID NO:226, and a second polypeptide having at least 80%, at least 85%, at least 90%, at least 91%, at least 92%, at least 93%, at least 94%, at least 95%, at least 96%, at least 97%, at least 98%, at least 99% or 100% identity to SEQ ID NO:227. In some preferred aspects, the first polypeptide and second polypeptide have at least 90% identity with the corresponding amino acid sequences specified above. As used herein, “at least 90% identity” includes at least 91%, 92%, 93%, 94%, 95%, 96%, 97%, 98%, 99% and 100% identity to the recited reference sequence. In some particularly preferred aspects, the first polypeptide and second polypeptide comprise or consist of the corresponding amino acid sequences specified above.

[0535] In some aspects, an antigen binding polypeptide complex provided herein comprises a first polypeptide having at least 80%, at least 85%, at least 90%, at least 91%, at least 92%, at least 93%, at least 94%, at least 95%, at least 96%, at least 97%, at least 98%, at least 99% or 100% identity to SEQ ID NO:228, and a second polypeptide having at least 80%, at least 85%, at least 90%, at least 91%, at least 92%, at least 93%, at least 94%, at least 95%, at least 96%, at least 97%, at least 98%, at least 99% or 100% identity to SEQ ID NO:228. In some preferred aspects, the first polypeptide and second polypeptide have at least 90% identity with the corresponding amino acid sequences specified above. As used herein, “at least 90% identity” includes at least 91%, 92%, 93%, 94%, 95%, 96%, 97%, 98%, 99% and 100% identity to the recited reference sequence. In some particularly preferred aspects, the first polypeptide and second polypeptide comprise or consist of the corresponding amino acid sequences specified above.

[0536] In some aspects, an antigen binding polypeptide complex provided herein comprises a first polypeptide having at least 80%, at least 85%, at least 90%, at least 91%, at least 92%, at least 93%, at least 94%, at least 95%, at least 96%, at least 97%, at least 98%, at least 99% or 100% identity to SEQ ID NO:229, and a second polypeptide having at least 80%, at least 85%, at least 90%, at least 91%, at least 92%, at least 93%, at least 94%, at least 95%, at least 96%, at least 97%, at least 98%, at least 99% or 100% identity to SEQ ID NO:229. In some preferred aspects, the first polypeptide and second polypeptide have at least 90% identity with the corresponding amino acid sequences specified above. As used herein, “at least 90% identity” includes at least 91%, 92%, 93%, 94%, 95%, 96%, 97%, 98%, 99% and 100% identity to the recited reference sequence. In some particularly preferred aspects, the first polypeptide and second polypeptide comprise or consist of the corresponding amino acid sequences specified above.

[0537] In some aspects, an antigen binding polypeptide complex provided herein comprises a first polypeptide having at least 80%, at least 85%, at least 90%, at least 91%, at least 92%, at least 93%, at least 94%, at least 95%, at least 96%, at least 97%, at least 98%, at least 99% or 100% identity to SEQ ID NO:230, and a second polypeptide having at least 80%, at least 85%, at least 90%, at least 91%, at least 92%, at least 93%, at least 94%, at least 95%, at least 96%, at least 97%, at least 98%, at least 99% or 100% identity to SEQ ID NO:231. In some preferred aspects, the first polypeptide and second polypeptide have at least 90% identity with the corresponding amino acid sequences specified above. As used herein, “at least 90% identity” includes at least 91%, 92%, 93%, 94%, 95%, 96%, 97%, 98%, 99% and 100% identity to the recited reference sequence. In some particularly preferred aspects, the first polypeptide and second polypeptide comprise or consist of the corresponding amino acid sequences specified above.

[0538] In some aspects, an antigen binding polypeptide complex provided herein comprises a first polypeptide having at least 80%, at least 85%, at least 90%, at least 91%, at least 92%, at least 93%, at least 94%, at least 95%, at least 96%, at least 97%, at least 98%, at least 99% or 100% identity to SEQ ID NO:232, and a second polypeptide having at least 80%, at least 85%, at least 90%, at least 91%, at least 92%, at least 93%, at least 94%, at least 95%, at least 96%, at least 97%, at least 98%, at least 99% or 100% identity to SEQ ID NO:233. In some preferred aspects, the first polypeptide and second polypeptide have at least 90% identity with the corresponding amino acid sequences specified above. As used herein, “at least 90% identity” includes at least 91%, 92%, 93%, 94%, 95%, 96%, 97%, 98%, 99% and 100% identity to the recited reference sequence. In some particularly preferred aspects, the first polypeptide and second polypeptide comprise or consist of the corresponding amino acid sequences specified above.

[0539] In some aspects, an antigen binding polypeptide complex provided herein comprises a first polypeptide having at least 80%, at least 85%, at least 90%, at least 91%, at least 92%, at least 93%, at least 94%, at least 95%, at least 96%, at least 97%, at least 98%, at least 99% or 100% identity to SEQ ID NO:234, and a second polypeptide having at least 80%, at least 85%, at least 90%, at least 91%, at least 92%, at least 93%, at least 94%, at least 95%, at least 96%, at least 97%, at least 98%, at least 99% or 100% identity to SEQ ID NO:235. In some preferred aspects, the first polypeptide and second polypeptide have at least 90% identity with the corresponding amino acid sequences specified above. As used herein, “at least 90% identity” includes at least 91%, 92%, 93%, 94%, 95%, 96%, 97%, 98%, 99% and 100% identity to the recited reference sequence. In some particularly preferred aspects, the first polypeptide and second polypeptide comprise or consist of the corresponding amino acid sequences specified above.

[0540] In some aspects, an antigen binding polypeptide complex provided herein comprises a first polypeptide having at least 80%, at least 85%, at least 90%, at least 91%, at least 92%, at least 93%, at least 94%, at least 95%, at least 96%, at least 97%, at least 98%, at least 99% or 100% identity to SEQ ID NO:236, and a second polypeptide having at least 80%, at least 85%, at least 90%, at least 91%, at least 92%, at least 93%, at least 94%, at least 95%, at least 96%, at least 97%, at least 98%, at least 99% or 100% identity to SEQ ID NO:237. In some preferred aspects, the first polypeptide and second polypeptide have at least 90% identity with the corresponding amino acid sequences specified above. As used herein, “at least 90% identity” includes at least 91%, 92%, 93%, 94%, 95%, 96%, 97%, 98%, 99% and 100% identity to the recited reference sequence. In some particularly preferred aspects, the first polypeptide and second polypeptide comprise or consist of the corresponding amino acid sequences specified above.

[0541] In some aspects, an antigen binding polypeptide complex provided herein comprises a first polypeptide having at least 80%, at least 85%, at least 90%, at least 91%, at least 92%, at least 93%, at least 94%, at least 95%, at least 96%, at least 97%, at least 98%, at least 99% or 100% identity to SEQ ID NO:238, and a second polypeptide having at least 80%, at least 85%, at least 90%, at least 91%, at least 92%, at least 93%, at least 94%, at least 95%, at least 96%, at least 97%, at least 98%, at least 99% or 100% identity to SEQ ID NO:239. In some preferred aspects, the first polypeptide and second polypeptide have at least 90% identity with the corresponding amino acid sequences specified above. As used herein, “at least 90% identity” includes at least 91%, 92%, 93%, 94%, 95%, 96%, 97%, 98%, 99% and 100% identity to the recited reference sequence. In some particularly preferred aspects, the first polypeptide and second polypeptide comprise or consist of the corresponding amino acid sequences specified above.

[0542] In some aspects, an antigen binding polypeptide complex provided herein comprises a first polypeptide having at least 80%, at least 85%, at least 90%, at least 91%, at least 92%, at least 93%, at least 94%, at least 95%, at least 96%, at least 97%, at least 98%, at least 99% or 100% identity to SEQ ID NO:240, and a second polypeptide having at least 80%, at least 85%, at least 90%, at least 91%, at least 92%, at least 93%, at least 94%, at least 95%, at least 96%, at least 97%, at least 98%, at least 99% or 100% identity to SEQ ID NO:241. In some preferred aspects, the first polypeptide and second polypeptide have at least 90% identity with the corresponding amino acid sequences specified above. As used herein, “at least 90% identity” includes at least 91%, 92%, 93%, 94%, 95%, 96%, 97%, 98%, 99% and 100% identity to the recited reference sequence. In some particularly preferred aspects, the first polypeptide and second polypeptide comprise or consist of the corresponding amino acid sequences specified above.

[0543] In some aspects, an antigen binding polypeptide complex provided herein comprises a first polypeptide having at least 80%, at least 85%, at least 90%, at least 91%, at least 92%, at least 93%, at least 94%, at least 95%, at least 96%, at least 97%, at least 98%, at least 99% or 100% identity to SEQ ID NO:242, and a second polypeptide having at least 80%, at least 85%, at least 90%, at least 91%, at least 92%, at least 93%, at least 94%, at least 95%, at least 96%, at least 97%, at least 98%, at least 99% or 100% identity to SEQ ID NO:243. In some preferred aspects, the first polypeptide and second polypeptide have at least 90% identity with the corresponding amino acid sequences specified above. As used herein, “at least 90% identity” includes at least 91%, 92%, 93%, 94%, 95%, 96%, 97%, 98%, 99% and 100% identity to the recited reference sequence. In some particularly preferred aspects, the first polypeptide and second polypeptide comprise or consist of the corresponding amino acid sequences specified above.

[0544] In some aspects, an antigen binding polypeptide complex provided herein comprises a first polypeptide having at least 80%, at least 85%, at least 90%, at least 91%, at least 92%, at least 93%, at least 94%, at least 95%, at least 96%, at least 97%, at least 98%, at least 99% or 100% identity to SEQ ID NO:244, and a second polypeptide having at least 80%, at least 85%, at least 90%, at least 91%, at least 92%, at least 93%, at least 94%, at least 95%, at least 96%, at least 97%, at least 98%, at least 99% or 100% identity to SEQ ID NO:245. In some preferred aspects, the first polypeptide and second polypeptide have at least 90% identity with the corresponding amino acid sequences specified above. As used herein, “at least 90% identity” includes at least 91%, 92%, 93%, 94%, 95%, 96%, 97%, 98%, 99% and 100% identity to the recited reference sequence. In some particularly preferred aspects, the first polypeptide and second polypeptide comprise or consist of the corresponding amino acid sequences specified above.

[0545] In some aspects, an antigen binding polypeptide complex provided herein comprises a first polypeptide having at least 80%, at least 85%, at least 90%, at least 91%, at least 92%, at least 93%, at least 94%, at least 95%, at least 96%, at least 97%, at least 98%, at least 99% or 100% identity to SEQ ID NO:246, and a second polypeptide having at least 80%, at least 85%, at least 90%, at least 91%, at least 92%, at least 93%, at least 94%, at least 95%, at least 96%, at least 97%, at least 98%, at least 99% or 100% identity to SEQ ID NO:247. In some preferred aspects, the first polypeptide and second polypeptide have at least 90% identity with the corresponding amino acid sequences specified above. As used herein, “at least 90% identity” includes at least 91%, 92%, 93%, 94%, 95%, 96%, 97%, 98%, 99% and 100% identity to the recited reference sequence. In some particularly preferred aspects, the first polypeptide and second polypeptide comprise or consist of the corresponding amino acid sequences specified above.

[0546] In some aspects, an antigen binding polypeptide complex provided herein comprises a first polypeptide having at least 80%, at least 85%, at least 90%, at least 91%, at least 92%, at least 93%, at least 94%, at least 95%, at least 96%, at least 97%, at least 98%, at least 99% or 100% identity to SEQ ID NO:248, and a second polypeptide having at least 80%, at least 85%, at least 90%, at least 91%, at least 92%, at least 93%, at least 94%, at least 95%, at least 96%, at least 97%, at least 98%, at least 99% or 100% identity to SEQ ID NO:249. In some preferred aspects, the first polypeptide and second polypeptide have at least 90% identity with the corresponding amino acid sequences specified above. As used herein, “at least 90% identity” includes at least 91%, 92%, 93%, 94%, 95%, 96%, 97%, 98%, 99% and 100% identity to the recited reference sequence. In some particularly preferred aspects, the first polypeptide and second polypeptide comprise or consist of the corresponding amino acid sequences specified above.

[0547] In some aspects, an antigen binding polypeptide complex provided herein comprises a first polypeptide having at least 80%, at least 85%, at least 90%, at least 91%, at least 92%, at least 93%, at least 94%, at least 95%, at least 96%, at least 97%, at least 98%, at least 99% or 100% identity to SEQ ID NO:250, and a second polypeptide having at least 80%, at least 85%, at least 90%, at least 91%, at least 92%, at least 93%, at least 94%, at least 95%, at least 96%, at least 97%, at least 98%, at least 99% or 100% identity to SEQ ID NO:251. In some preferred aspects, the first polypeptide and second polypeptide have at least 90% identity with the corresponding amino acid sequences specified above. As used herein, “at least 90% identity” includes at least 91%, 92%, 93%, 94%, 95%, 96%, 97%, 98%, 99% and 100% identity to the recited reference sequence. In some particularly preferred aspects, the first polypeptide and second polypeptide comprise or consist of the corresponding amino acid sequences specified above.

[0548] In some aspects, an antigen binding polypeptide complex provided herein comprises a first polypeptide having at least 80%, at least 85%, at least 90%, at least 91%, at least 92%, at least 93%, at least 94%, at least 95%, at least 96%, at least 97%, at least 98%, at least 99% or 100% identity to SEQ ID NO:252, and a second polypeptide having at least 80%, at least 85%, at least 90%, at least 91%, at least 92%, at least 93%, at least 94%, at least 95%, at least 96%, at least 97%, at least 98%, at least 99% or 100% identity to SEQ ID NO:253. In some preferred aspects, the first polypeptide and second polypeptide have at least 90% identity with the corresponding amino acid sequences specified above. As used herein, “at least 90% identity” includes at least 91%, 92%, 93%, 94%, 95%, 96%, 97%, 98%, 99% and 100% identity to the recited reference sequence. In some particularly preferred aspects, the first polypeptide and second polypeptide comprise or consist of the corresponding amino acid sequences specified above.

[0549] In some aspects, an antigen binding polypeptide complex provided herein comprises a first polypeptide having at least 80%, at least 85%, at least 90%, at least 91%, at least 92%, at least 93%, at least 94%, at least 95%, at least 96%, at least 97%, at least 98%, at least 99% or 100% identity to SEQ ID NO:254, and a second polypeptide having at least 80%, at least 85%, at least 90%, at least 91%, at least 92%, at least 93%, at least 94%, at least 95%, at least 96%, at least 97%, at least 98%, at least 99% or 100% identity to SEQ ID NO:255. In some preferred aspects, the first polypeptide and second polypeptide have at least 90% identity with the corresponding amino acid sequences specified above. As used herein, “at least 90% identity” includes at least 91%, 92%, 93%, 94%, 95%, 96%, 97%, 98%, 99% and 100% identity to the recited reference sequence. In some particularly preferred aspects, the first polypeptide and second polypeptide comprise or consist of the corresponding amino acid sequences specified above.

[0550] In some aspects, an antigen binding polypeptide or antigen binding polypeptide complex provided herein comprises a polypeptide having a structure represented by VL1-L1-VL2-L2-VH2-L3-VH1-L4-Fc-L5-Fc; VL.1-L1-VH2-L2-VL2-L3-VH1-L4-Fc-L5-Fc; VH1-L6-VH2-L7-VL2-L8-VL1-L9-Fc-L10-Fc; or VH1-L6-VL2-L7-VH2-L8-VL.1-L9-Fc-L10-Fc; wherein VL1 is a first immunoglobulin light chain variable region that specifically binds to a SARS-CoV-2 protein; VL2 is a second immunoglobulin light chain variable region that specifically binds a SARS-CoV-2 protein; VH1 is a first immunoglobulin heavy chain variable region that specifically binds to a SARS-CoV-2 protein; VH2 is a second immunoglobulin heavy chain variable region that specifically binds to a SARS-CoV-2 protein; Fc is a region comprising an immunoglobulin heavy chain constant region 2 (CH2), an immunoglobulin heavy chain constant region 3 (CH3), and optionally, an immunoglobulin hinge; and L1-L10 are amino acid linkers.

[0551] In some aspects, an antigen binding polypeptide or antigen binding polypeptide complex provided herein comprises a polypeptide having a structure represented by VL1-L1-VL2-L2-VH2-L3-VH1-L4-Fc-L5-Fc or VH1-L6-VH2-L7-VL2-L8-VL1-L9-Fc-L10-Fc; wherein VL1 is a first immunoglobulin light chain variable region that specifically binds to a SARS-CoV-2 protein; VL2 is a second immunoglobulin light chain variable region that specifically binds a SARS-CoV-2 protein; VH1 is a first immunoglobulin heavy chain variable region that specifically binds to a SARS-CoV-2 protein; VH2 is a second immunoglobulin heavy chain variable region that specifically binds to a SARS-CoV-2 protein; Fc is a region comprising an immunoglobulin heavy chain constant region 2 (CH2), an immunoglobulin heavy chain constant region 3 (CH3), and optionally, an immunoglobulin hinge; and L1-L10 are amino acid linkers.

[0552] In some aspects, an antigen binding polypeptide or antigen binding polypeptide complex provided herein comprises a polypeptide having a structure represented by VL1-L1-VH2-L2-VL2-L3-VH1-L4-Fc-L5-Fc or VH1-L6-VL2-L7-VH2-L8-VL1-L9-Fc-L10-Fc; wherein VL1 is a first immunoglobulin light chain variable region that specifically binds to a SARS-CoV-2 protein; VL2 is a second immunoglobulin light chain variable region that specifically binds a SARS-CoV-2 protein; VH1 is a first immunoglobulin heavy chain variable region that specifically binds to a SARS-CoV-2 protein; VH2 is a second immunoglobulin heavy chain variable region that specifically binds to a SARS-CoV-2 protein; Fc is a region comprising an immunoglobulin heavy chain constant region 2 (CH2), an immunoglobulin heavy chain constant region 3 (CH3), and optionally, an immunoglobulin hinge; and L1-L10 are amino acid linkers.

[0553] In some aspects, an antigen binding polypeptide or antigen binding polypeptide complex provided herein comprises an amino acid sequence having at least 80%, at least 85%, at least 90%, at least 91%, at least 92%, at least 93%, at least 94%, at least 95%, at least 96%, at least 97%, at least 98%, at least 99% or 100% identity to any one of SEQ ID NOs:78-113, 150-165, 190-258, 291, 295, 297, 299, 301, 303, 305, 307, 309, 311, 313, 315, 317, 319, 321, 323, 325, 327, 329, 331, 333, 335, 337, 339, 341, 343, 345, 347, 349, 351, 353, 355, 357, 359, 361, 363, 365, 367, 369, 371, 373, 375, 377, 379, 381, 383, 385, 387, 389, 391, 395, 397, 399, 401, 403, 405, 407, 409, 411, 413, 415, 417, 419, 421, 423, 425, 427, 429, 431, 433, 435, 437, 439, 441, 443, 445, 447, 449, 451, 453, 455, 457, 459, 461, 463, 465, 467, 469, 471, 473, 475, 477, 479, 481, 483, 485, 487, 489, 491, 493, 495, 497, 499, 501, 503, 505 and 711-754. In some preferred aspects, the antigen binding polypeptide or antigen binding polypeptide complex comprises an amino acid having at least 90% identity with a corresponding amino acid sequence specified above. As used herein, “at least 90% identity” includes at least 91%, 92%, 93%, 94%, 95%, 96%, 97%, 98%, 99% and 100% identity to the recited reference sequence. In some particularly preferred aspects, the antigen binding polypeptide or antigen binding polypeptide complex comprises or consists of a corresponding amino acid sequence specified above.

[0554] In some aspects, an antigen binding polypeptide or antigen binding polypeptide complex provided herein comprises an amino acid sequence having at least 80%, at least 85%, at least 90%, at least 91%, at least 92%, at least 93%, at least 94%, at least 95%, at least 96%, at least 97%, at least 98%, at least 99% or 100% identity to SEQ ID NO:78. In some aspects, an antigen binding polypeptide complex provided herein comprises a first polypeptide having at least 80%, at least 85%, at least 90%, at least 91%, at least 92%, at least 93%, at least 94%, at least 95%, at least 96%, at least 97%, at least 98%, at least 99% or 100% identity to SEQ ID NO:78, and a second polypeptide having at least 80%, at least 85%, at least 90%, at least 91%, at least 92%, at least 93%, at least 94%, at least 95%, at least 96%, at least 97%, at least 98%, at least 99% or 100% identity to SEQ ID NO:78. In some preferred aspects, the first polypeptide and second polypeptide have at least 90% identity with the corresponding amino acid sequences specified above. As used herein, “at least 90% identity” includes at least 91%, 92%, 93%, 94%, 95%, 96%, 97%, 98%, 99% and 100% identity to the recited reference sequence. In some particularly preferred aspects, the first polypeptide and second polypeptide comprise or consist of the corresponding amino acid sequences specified above.

[0555] In some aspects, an antigen binding polypeptide or antigen binding polypeptide complex provided herein comprises an amino acid sequence having at least 80%, at least 85%, at least 90%, at least 91%, at least 92%, at least 93%, at least 94%, at least 95%, at least 96%, at least 97%, at least 98%, at least 99% or 100% identity to SEQ ID NO:79. In some aspects, an antigen binding polypeptide complex provided herein comprises a first polypeptide having at least 80%, at least 85%, at least 90%, at least 91%, at least 92%, at least 93%, at least 94%, at least 95%, at least 96%, at least 97%, at least 98%, at least 99% or 100% identity to SEQ ID NO:79, and a second polypeptide having at least 80%, at least 85%, at least 90%, at least 91%, at least 92%, at least 93%, at least 94%, at least 95%, at least 96%, at least 97%, at least 98%, at least 99% or 100% identity to SEQ ID NO:79. In some preferred aspects, the first polypeptide and second polypeptide have at least 90% identity with the corresponding amino acid sequences specified above. As used herein, “at least 90% identity” includes at least 91%, 92%, 93%, 94%, 95%, 96%, 97%, 98%, 99% and 100% identity to the recited reference sequence. In some particularly preferred aspects, the first polypeptide and second polypeptide comprise or consist of the corresponding amino acid sequences specified above.

[0556] In some aspects, an antigen binding polypeptide or antigen binding polypeptide complex provided herein comprises an amino acid sequence having at least 80%, at least 85%, at least 90%, at least 91%, at least 92%, at least 93%, at least 94%, at least 95%, at least 96%, at least 97%, at least 98%, at least 99% or 100% identity to SEQ ID NO:80. In some aspects, an antigen binding polypeptide complex provided herein comprises a first polypeptide having at least 80%, at least 85%, at least 90%, at least 91%, at least 92%, at least 93%, at least 94%, at least 95%, at least 96%, at least 97%, at least 98%, at least 99% or 100% identity to SEQ ID NO:80, and a second polypeptide having at least 80%, at least 85%, at least 90%, at least 91%, at least 92%, at least 93%, at least 94%, at least 95%, at least 96%, at least 97%, at least 98%, at least 99% or 100% identity to SEQ ID NO:80. In some preferred aspects, the first polypeptide and second polypeptide have at least 90% identity with the corresponding amino acid sequences specified above. As used herein, “at least 90% identity” includes at least 91%, 92%, 93%, 94%, 95%, 96%, 97%, 98%, 99% and 100% identity to the recited reference sequence. In some particularly preferred aspects, the first polypeptide and second polypeptide comprise or consist of the corresponding amino acid sequences specified above.

[0557] In some aspects, an antigen binding polypeptide or antigen binding polypeptide complex provided herein comprises an amino acid sequence having at least 80%, at least 85%, at least 90%, at least 91%, at least 92%, at least 93%, at least 94%, at least 95%, at least 96%, at least 97%, at least 98%, at least 99% or 100% identity to SEQ ID NO:81. In some aspects, an antigen binding polypeptide complex provided herein comprises a first polypeptide having at least 80%, at least 85%, at least 90%, at least 91%, at least 92%, at least 93%, at least 94%, at least 95%, at least 96%, at least 97%, at least 98%, at least 99% or 100% identity to SEQ ID NO:81, and a second polypeptide having at least 80%, at least 85%, at least 90%, at least 91%, at least 92%, at least 93%, at least 94%, at least 95%, at least 96%, at least 97%, at least 98%, at least 99% or 100% identity to SEQ ID NO:81. In some preferred aspects, the first polypeptide and second polypeptide have at least 90% identity with the corresponding amino acid sequences specified above. As used herein, “at least 90% identity” includes at least 91%, 92%, 93%, 94%, 95%, 96%, 97%, 98%, 99% and 100% identity to the recited reference sequence. In some particularly preferred aspects, the first polypeptide and second polypeptide comprise or consist of the corresponding amino acid sequences specified above.

[0558] In some aspects, an antigen binding polypeptide or antigen binding polypeptide complex provided herein comprises an amino acid sequence having at least 80%, at least 85%, at least 90%, at least 91%, at least 92%, at least 93%, at least 94%, at least 95%, at least 96%, at least 97%, at least 98%, at least 99% or 100% identity to SEQ ID NO:82. In some aspects, an antigen binding polypeptide complex provided herein comprises a first polypeptide having at least 80%, at least 85%, at least 90%, at least 91%, at least 92%, at least 93%, at least 94%, at least 95%, at least 96%, at least 97%, at least 98%, at least 99% or 100% identity to SEQ ID NO:82, and a second polypeptide having at least 80%, at least 85%, at least 90%, at least 91%, at least 92%, at least 93%, at least 94%, at least 95%, at least 96%, at least 97%, at least 98%, at least 99% or 100% identity to SEQ ID NO:82. In some preferred aspects, the first polypeptide and second polypeptide have at least 90% identity with the corresponding amino acid sequences specified above. As used herein, “at least 90% identity” includes at least 91%, 92%, 93%, 94%, 95%, 96%, 97%, 98%, 99% and 100% identity to the recited reference sequence. In some particularly preferred aspects, the first polypeptide and second polypeptide comprise or consist of the corresponding amino acid sequences specified above.

[0559] In some aspects, an antigen binding polypeptide or antigen binding polypeptide complex provided herein comprises an amino acid sequence having at least 80%, at least 85%, at least 90%, at least 91%, at least 92%, at least 93%, at least 94%, at least 95%, at least 96%, at least 97%, at least 98%, at least 99% or 100% identity to SEQ ID NO:83. In some aspects, an antigen binding polypeptide complex provided herein comprises a first polypeptide having at least 80%, at least 85%, at least 90%, at least 91%, at least 92%, at least 93%, at least 94%, at least 95%, at least 96%, at least 97%, at least 98%, at least 99% or 100% identity to SEQ ID NO:83, and a second polypeptide having at least 80%, at least 85%, at least 90%, at least 91%, at least 92%, at least 93%, at least 94%, at least 95%, at least 96%, at least 97%, at least 98%, at least 99% or 100% identity to SEQ ID NO:83. In some preferred aspects, the first polypeptide and second polypeptide have at least 90% identity with the corresponding amino acid sequences specified above. As used herein, “at least 90% identity” includes at least 91%, 92%, 93%, 94%, 95%, 96%, 97%, 98%, 99% and 100% identity to the recited reference sequence. In some particularly preferred aspects, the first polypeptide and second polypeptide comprise or consist of the corresponding amino acid sequences specified above.

[0560] In some aspects, an antigen binding polypeptide or antigen binding polypeptide complex provided herein comprises an amino acid sequence having at least 80%, at least 85%, at least 90%, at least 91%, at least 92%, at least 93%, at least 94%, at least 95%, at least 96%, at least 97%, at least 98%, at least 99% or 100% identity to SEQ ID NO:84. In some aspects, an antigen binding polypeptide complex provided herein comprises a first polypeptide having at least 80%, at least 85%, at least 90%, at least 91%, at least 92%, at least 93%, at least 94%, at least 95%, at least 96%, at least 97%, at least 98%, at least 99% or 100% identity to SEQ ID NO:84, and a second polypeptide having at least 80%, at least 85%, at least 90%, at least 91%, at least 92%, at least 93%, at least 94%, at least 95%, at least 96%, at least 97%, at least 98%, at least 99% or 100% identity to SEQ ID NO:84. In some preferred aspects, the first polypeptide and second polypeptide have at least 90% identity with the corresponding amino acid sequences specified above. As used herein, “at least 90% identity” includes at least 91%, 92%, 93%, 94%, 95%, 96%, 97%, 98%, 99% and 100% identity to the recited reference sequence. In some particularly preferred aspects, the first polypeptide and second polypeptide comprise or consist of the corresponding amino acid sequences specified above.

[0561] In some aspects, an antigen binding polypeptide or antigen binding polypeptide complex provided herein comprises an amino acid sequence having at least 80%, at least 85%, at least 90%, at least 91%, at least 92%, at least 93%, at least 94%, at least 95%, at least 96%, at least 97%, at least 98%, at least 99% or 100% identity to SEQ ID NO:85. In some aspects, an antigen binding polypeptide complex provided herein comprises a first polypeptide having at least 80%, at least 85%, at least 90%, at least 91%, at least 92%, at least 93%, at least 94%, at least 95%, at least 96%, at least 97%, at least 98%, at least 99% or 100% identity to SEQ ID NO:85, and a second polypeptide having at least 80%, at least 85%, at least 90%, at least 91%, at least 92%, at least 93%, at least 94%, at least 95%, at least 96%, at least 97%, at least 98%, at least 99% or 100% identity to SEQ ID NO:85. In some preferred aspects, the first polypeptide and second polypeptide have at least 90% identity with the corresponding amino acid sequences specified above. As used herein, “at least 90% identity” includes at least 91%, 92%, 93%, 94%, 95%, 96%, 97%, 98%, 99% and 100% identity to the recited reference sequence. In some particularly preferred aspects, the first polypeptide and second polypeptide comprise or consist of the corresponding amino acid sequences specified above.

[0562] In some aspects, an antigen binding polypeptide or antigen binding polypeptide complex provided herein comprises an amino acid sequence having at least 80%, at least 85%, at least 90%, at least 91%, at least 92%, at least 93%, at least 94%, at least 95%, at least 96%, at least 97%, at least 98%, at least 99% or 100% identity to SEQ ID NO:86. In some aspects, an antigen binding polypeptide complex provided herein comprises a first polypeptide having at least 80%, at least 85%, at least 90%, at least 91%, at least 92%, at least 93%, at least 94%, at least 95%, at least 96%, at least 97%, at least 98%, at least 99% or 100% identity to SEQ ID NO:86, and a second polypeptide having at least 80%, at least 85%, at least 90%, at least 91%, at least 92%, at least 93%, at least 94%, at least 95%, at least 96%, at least 97%, at least 98%, at least 99% or 100% identity to SEQ ID NO:86. In some preferred aspects, the first polypeptide and second polypeptide have at least 90% identity with the corresponding amino acid sequences specified above. As used herein, “at least 90% identity” includes at least 91%, 92%, 93%, 94%, 95%, 96%, 97%, 98%, 99% and 100% identity to the recited reference sequence. In some particularly preferred aspects, the first polypeptide and second polypeptide comprise or consist of the corresponding amino acid sequences specified above.

[0563] In some aspects, an antigen binding polypeptide or antigen binding polypeptide complex provided herein comprises an amino acid sequence having at least 80%, at least 85%, at least 90%, at least 91%, at least 92%, at least 93%, at least 94%, at least 95%, at least 96%, at least 97%, at least 98%, at least 99% or 100% identity to SEQ ID NO:87. In some aspects, an antigen binding polypeptide complex provided herein comprises a first polypeptide having at least 80%, at least 85%, at least 90%, at least 91%, at least 92%, at least 93%, at least 94%, at least 95%, at least 96%, at least 97%, at least 98%, at least 99% or 100% identity to SEQ ID NO:87, and a second polypeptide having at least 80%, at least 85%, at least 90%, at least 91%, at least 92%, at least 93%, at least 94%, at least 95%, at least 96%, at least 97%, at least 98%, at least 99% or 100% identity to SEQ ID NO:87. In some preferred aspects, the first polypeptide and second polypeptide have at least 90% identity with the corresponding amino acid sequences specified above. As used herein, “at least 90% identity” includes at least 91%, 92%, 93%, 94%, 95%, 96%, 97%, 98%, 99% and 100% identity to the recited reference sequence. In some particularly preferred aspects, the first polypeptide and second polypeptide comprise or consist of the corresponding amino acid sequences specified above.

[0564] In some aspects, an antigen binding polypeptide or antigen binding polypeptide complex provided herein comprises an amino acid sequence having at least 80%, at least 85%, at least 90%, at least 91%, at least 92%, at least 93%, at least 94%, at least 95%, at least 96%, at least 97%, at least 98%, at least 99% or 100% identity to SEQ ID NO:88. In some aspects, an antigen binding polypeptide complex provided herein comprises a first polypeptide having at least 80%, at least 85%, at least 90%, at least 91%, at least 92%, at least 93%, at least 94%, at least 95%, at least 96%, at least 97%, at least 98%, at least 99% or 100% identity to SEQ ID NO:88, and a second polypeptide having at least 80%, at least 85%, at least 90%, at least 91%, at least 92%, at least 93%, at least 94%, at least 95%, at least 96%, at least 97%, at least 98%, at least 99% or 100% identity to SEQ ID NO:88. In some preferred aspects, the first polypeptide and second polypeptide have at least 90% identity with the corresponding amino acid sequences specified above. As used herein, “at least 90% identity” includes at least 91%, 92%, 93%, 94%, 95%, 96%, 97%, 98%, 99% and 100% identity to the recited reference sequence. In some particularly preferred aspects, the first polypeptide and second polypeptide comprise or consist of the corresponding amino acid sequences specified above.

[0565] In some aspects, an antigen binding polypeptide or antigen binding polypeptide complex provided herein comprises an amino acid sequence having at least 80%, at least 85%, at least 90%, at least 91%, at least 92%, at least 93%, at least 94%, at least 95%, at least 96%, at least 97%, at least 98%, at least 99% or 100% identity to SEQ ID NO:89. In some aspects, an antigen binding polypeptide complex provided herein comprises a first polypeptide having at least 80%, at least 85%, at least 90%, at least 91%, at least 92%, at least 93%, at least 94%, at least 95%, at least 96%, at least 97%, at least 98%, at least 99% or 100% identity to SEQ ID NO:89, and a second polypeptide having at least 80%, at least 85%, at least 90%, at least 91%, at least 92%, at least 93%, at least 94%, at least 95%, at least 96%, at least 97%, at least 98%, at least 99% or 100% identity to SEQ ID NO:89. In some preferred aspects, the first polypeptide and second polypeptide have at least 90% identity with the corresponding amino acid sequences specified above. As used herein, “at least 90% identity” includes at least 91%, 92%, 93%, 94%, 95%, 96%, 97%, 98%, 99% and 100% identity to the recited reference sequence. In some particularly preferred aspects, the first polypeptide and second polypeptide comprise or consist of the corresponding amino acid sequences specified above.

[0566] In some aspects, an antigen binding polypeptide or antigen binding polypeptide complex provided herein comprises an amino acid sequence having at least 80%, at least 85%, at least 90%, at least 91%, at least 92%, at least 93%, at least 94%, at least 95%, at least 96%, at least 97%, at least 98%, at least 99% or 100% identity to SEQ ID NO:90. In some aspects, an antigen binding polypeptide complex provided herein comprises a first polypeptide having at least 80%, at least 85%, at least 90%, at least 91%, at least 92%, at least 93%, at least 94%, at least 95%, at least 96%, at least 97%, at least 98%, at least 99% or 100% identity to SEQ ID NO:90, and a second polypeptide having at least 80%, at least 85%, at least 90%, at least 91%, at least 92%, at least 93%, at least 94%, at least 95%, at least 96%, at least 97%, at least 98%, at least 99% or 100% identity to SEQ ID NO:90. In some preferred aspects, the first polypeptide and second polypeptide have at least 90% identity with the corresponding amino acid sequences specified above. As used herein, “at least 90% identity” includes at least 91%, 92%, 93%, 94%, 95%, 96%, 97%, 98%, 99% and 100% identity to the recited reference sequence. In some particularly preferred aspects, the first polypeptide and second polypeptide comprise or consist of the corresponding amino acid sequences specified above.

[0567] In some aspects, an antigen binding polypeptide or antigen binding polypeptide complex provided herein comprises an amino acid sequence having at least 80%, at least 85%, at least 90%, at least 91%, at least 92%, at least 93%, at least 94%, at least 95%, at least 96%, at least 97%, at least 98%, at least 99% or 100% identity to SEQ ID NO:91. In some aspects, an antigen binding polypeptide complex provided herein comprises a first polypeptide having at least 80%, at least 85%, at least 90%, at least 91%, at least 92%, at least 93%, at least 94%, at least 95%, at least 96%, at least 97%, at least 98%, at least 99% or 100% identity to SEQ ID NO:91, and a second polypeptide having at least 80%, at least 85%, at least 90%, at least 91%, at least 92%, at least 93%, at least 94%, at least 95%, at least 96%, at least 97%, at least 98%, at least 99% or 100% identity to SEQ ID NO:91. In some preferred aspects, the first polypeptide and second polypeptide have at least 90% identity with the corresponding amino acid sequences specified above. As used herein, “at least 90% identity” includes at least 91%, 92%, 93%, 94%, 95%, 96%, 97%, 98%, 99% and 100% identity to the recited reference sequence. In some particularly preferred aspects, the first polypeptide and second polypeptide comprise or consist of the corresponding amino acid sequences specified above.

[0568] In some aspects, an antigen binding polypeptide or antigen binding polypeptide complex provided herein comprises an amino acid sequence having at least 80%, at least 85%, at least 90%, at least 91%, at least 92%, at least 93%, at least 94%, at least 95%, at least 96%, at least 97%, at least 98%, at least 99% or 100% identity to SEQ ID NO:92. In some aspects, an antigen binding polypeptide complex provided herein comprises a first polypeptide having at least 80%, at least 85%, at least 90%, at least 91%, at least 92%, at least 93%, at least 94%, at least 95%, at least 96%, at least 97%, at least 98%, at least 99% or 100% identity to SEQ ID NO:92, and a second polypeptide having at least 80%, at least 85%, at least 90%, at least 91%, at least 92%, at least 93%, at least 94%, at least 95%, at least 96%, at least 97%, at least 98%, at least 99% or 100% identity to SEQ ID NO:92. In some preferred aspects, the first polypeptide and second polypeptide have at least 90% identity with the corresponding amino acid sequences specified above. As used herein, “at least 90% identity” includes at least 91%, 92%, 93%, 94%, 95%, 96%, 97%, 98%, 99% and 100% identity to the recited reference sequence. In some particularly preferred aspects, the first polypeptide and second polypeptide comprise or consist of the corresponding amino acid sequences specified above.

[0569] In some aspects, an antigen binding polypeptide or antigen binding polypeptide complex provided herein comprises an amino acid sequence having at least 80%, at least 85%, at least 90%, at least 91%, at least 92%, at least 93%, at least 94%, at least 95%, at least 96%, at least 97%, at least 98%, at least 99% or 100% identity to SEQ ID NO:93. In some aspects, an antigen binding polypeptide complex provided herein comprises a first polypeptide having at least 80%, at least 85%, at least 90%, at least 91%, at least 92%, at least 93%, at least 94%, at least 95%, at least 96%, at least 97%, at least 98%, at least 99% or 100% identity to SEQ ID NO:93, and a second polypeptide having at least 80%, at least 85%, at least 90%, at least 91%, at least 92%, at least 93%, at least 94%, at least 95%, at least 96%, at least 97%, at least 98%, at least 99% or 100% identity to SEQ ID NO:93. In some preferred aspects, the first polypeptide and second polypeptide have at least 90% identity with the corresponding amino acid sequences specified above. As used herein, “at least 90% identity” includes at least 91%, 92%, 93%, 94%, 95%, 96%, 97%, 98%, 99% and 100% identity to the recited reference sequence. In some particularly preferred aspects, the first polypeptide and second polypeptide comprise or consist of the corresponding amino acid sequences specified above.

[0570] In some aspects, an antigen binding polypeptide or antigen binding polypeptide complex provided herein comprises an amino acid sequence having at least 80%, at least 85%, at least 90%, at least 91%, at least 92%, at least 93%, at least 94%, at least 95%, at least 96%, at least 97%, at least 98%, at least 99% or 100% identity to SEQ ID NO:94. In some aspects, an antigen binding polypeptide complex provided herein comprises a first polypeptide having at least 80%, at least 85%, at least 90%, at least 91%, at least 92%, at least 93%, at least 94%, at least 95%, at least 96%, at least 97%, at least 98%, at least 99% or 100% identity to SEQ ID NO:94, and a second polypeptide having at least 80%, at least 85%, at least 90%, at least 91%, at least 92%, at least 93%, at least 94%, at least 95%, at least 96%, at least 97%, at least 98%, at least 99% or 100% identity to SEQ ID NO:94. In some preferred aspects, the first polypeptide and second polypeptide have at least 90% identity with the corresponding amino acid sequences specified above. As used herein, “at least 90% identity” includes at least 91%, 92%, 93%, 94%, 95%, 96%, 97%, 98%, 99% and 100% identity to the recited reference sequence. In some particularly preferred aspects, the first polypeptide and second polypeptide comprise or consist of the corresponding amino acid sequences specified above.

[0571] In some aspects, an antigen binding polypeptide or antigen binding polypeptide complex provided herein comprises an amino acid sequence having at least 80%, at least 85%, at least 90%, at least 91%, at least 92%, at least 93%, at least 94%, at least 95%, at least 96%, at least 97%, at least 98%, at least 99% or 100% identity to SEQ ID NO:95. In some aspects, an antigen binding polypeptide complex provided herein comprises a first polypeptide having at least 80%, at least 85%, at least 90%, at least 91%, at least 92%, at least 93%, at least 94%, at least 95%, at least 96%, at least 97%, at least 98%, at least 99% or 100% identity to SEQ ID NO:95, and a second polypeptide having at least 80%, at least 85%, at least 90%, at least 91%, at least 92%, at least 93%, at least 94%, at least 95%, at least 96%, at least 97%, at least 98%, at least 99% or 100% identity to SEQ ID NO:95. In some preferred aspects, the first polypeptide and second polypeptide have at least 90% identity with the corresponding amino acid sequences specified above. As used herein, “at least 90% identity” includes at least 91%, 92%, 93%, 94%, 95%, 96%, 97%, 98%, 99% and 100% identity to the recited reference sequence. In some particularly preferred aspects, the first polypeptide and second polypeptide comprise or consist of the corresponding amino acid sequences specified above.

[0572] In some aspects, an antigen binding polypeptide or antigen binding polypeptide complex provided herein comprises an amino acid sequence having at least 80%, at least 85%, at least 90%, at least 91%, at least 92%, at least 93%, at least 94%, at least 95%, at least 96%, at least 97%, at least 98%, at least 99% or 100% identity to SEQ ID NO:96. In some aspects, an antigen binding polypeptide complex provided herein comprises a first polypeptide having at least 80%, at least 85%, at least 90%, at least 91%, at least 92%, at least 93%, at least 94%, at least 95%, at least 96%, at least 97%, at least 98%, at least 99% or 100% identity to SEQ ID NO:96, and a second polypeptide having at least 80%, at least 85%, at least 90%, at least 91%, at least 92%, at least 93%, at least 94%, at least 95%, at least 96%, at least 97%, at least 98%, at least 99% or 100% identity to SEQ ID NO:96. In some preferred aspects, the first polypeptide and second polypeptide have at least 90% identity with the corresponding amino acid sequences specified above. As used herein, “at least 90% identity” includes at least 91%, 92%, 93%, 94%, 95%, 96%, 97%, 98%, 99% and 100% identity to the recited reference sequence. In some particularly preferred aspects, the first polypeptide and second polypeptide comprise or consist of the corresponding amino acid sequences specified above.

[0573] In some aspects, an antigen binding polypeptide or antigen binding polypeptide complex provided herein comprises an amino acid sequence having at least 80%, at least 85%, at least 90%, at least 91%, at least 92%, at least 93%, at least 94%, at least 95%, at least 96%, at least 97%, at least 98%, at least 99% or 100% identity to SEQ ID NO:97. In some aspects, an antigen binding polypeptide complex provided herein comprises a first polypeptide having at least 80%, at least 85%, at least 90%, at least 91%, at least 92%, at least 93%, at least 94%, at least 95%, at least 96%, at least 97%, at least 98%, at least 99% or 100% identity to SEQ ID NO:97, and a second polypeptide having at least 80%, at least 85%, at least 90%, at least 91%, at least 92%, at least 93%, at least 94%, at least 95%, at least 96%, at least 97%, at least 98%, at least 99% or 100% identity to SEQ ID NO:97. In some preferred aspects, the first polypeptide and second polypeptide have at least 90% identity with the corresponding amino acid sequences specified above. As used herein, “at least 90% identity” includes at least 91%, 92%, 93%, 94%, 95%, 96%, 97%, 98%, 99% and 100% identity to the recited reference sequence. In some particularly preferred aspects, the first polypeptide and second polypeptide comprise or consist of the corresponding amino acid sequences specified above.

[0574] In some aspects, an antigen binding polypeptide or antigen binding polypeptide complex provided herein comprises an amino acid sequence having at least 80%, at least 85%, at least 90%, at least 91%, at least 92%, at least 93%, at least 94%, at least 95%, at least 96%, at least 97%, at least 98%, at least 99% or 100% identity to SEQ ID NO:98. In some aspects, an antigen binding polypeptide or antigen binding polypeptide complex provided herein comprises an amino acid sequence having at least 80%, at least 85%, at least 90%, at least 91%, at least 92%, at least 93%, at least 94%, at least 95%, at least 96%, at least 97%, at least 98%, at least 99% or 100% identity to SEQ ID NO:99. In some aspects, an antigen binding polypeptide complex provided herein comprises a first polypeptide having at least 80%, at least 85%, at least 90%, at least 91%, at least 92%, at least 93%, at least 94%, at least 95%, at least 96%, at least 97%, at least 98%, at least 99% or 100% identity to SEQ ID NO:98, and a second polypeptide having at least 80%, at least 85%, at least 90%, at least 91%, at least 92%, at least 93%, at least 94%, at least 95%, at least 96%, at least 97%, at least 98%, at least 99% or 100% identity to SEQ ID NO:99. In some preferred aspects, the first polypeptide and second polypeptide have at least 90% identity with the corresponding amino acid sequences specified above. As used herein, “at least 90% identity” includes at least 91%, 92%, 93%, 94%, 95%, 96%, 97%, 98%, 99% and 100% identity to the recited reference sequence. In some particularly preferred aspects, the first polypeptide and second polypeptide comprise or consist of the corresponding amino acid sequences specified above.

[0575] In some aspects, an antigen binding polypeptide or antigen binding polypeptide complex provided herein comprises an amino acid sequence having at least 80%, at least 85%, at least 90%, at least 91%, at least 92%, at least 93%, at least 94%, at least 95%, at least 96%, at least 97%, at least 98%, at least 99% or 100% identity to SEQ ID NO:100. In some aspects, an antigen binding polypeptide or antigen binding polypeptide complex provided herein comprises an amino acid sequence having at least 80%, at least 85%, at least 90%, at least 91%, at least 92%, at least 93%, at least 94%, at least 95%, at least 96%, at least 97%, at least 98%, at least 99% or 100% identity to SEQ ID NO:101. In some aspects, an antigen binding polypeptide complex provided herein comprises a first polypeptide having at least 80%, at least 85%, at least 90%, at least 91%, at least 92%, at least 93%, at least 94%, at least 95%, at least 96%, at least 97%, at least 98%, at least 99% or 100% identity to SEQ ID NO:100, and a second polypeptide having at least 80%, at least 85%, at least 90%, at least 91%, at least 92%, at least 93%, at least 94%, at least 95%, at least 96%, at least 97%, at least 98%, at least 99% or 100% identity to SEQ ID NO:101. In some preferred aspects, the first polypeptide and second polypeptide have at least 90% identity with the corresponding amino acid sequences specified above. As used herein, “at least 90% identity” includes at least 91%, 92%, 93%, 94%, 95%, 96%, 97%, 98%, 99% and 100% identity to the recited reference sequence. In some particularly preferred aspects, the first polypeptide and second polypeptide comprise or consist of the corresponding amino acid sequences specified above.

[0576] In some aspects, an antigen binding polypeptide or antigen binding polypeptide complex provided herein comprises an amino acid sequence having at least 80%, at least 85%, at least 90%, at least 91%, at least 92%, at least 93%, at least 94%, at least 95%, at least 96%, at least 97%, at least 98%, at least 99% or 100% identity to SEQ ID NO:102. In some aspects, an antigen binding polypeptide or antigen binding polypeptide complex provided herein comprises an amino acid sequence having at least 80%, at least 85%, at least 90%, at least 91%, at least 92%, at least 93%, at least 94%, at least 95%, at least 96%, at least 97%, at least 98%, at least 99% or 100% identity to SEQ ID NO:103. In some aspects, an antigen binding polypeptide complex provided herein comprises a first polypeptide having at least 80%, at least 85%, at least 90%, at least 91%, at least 92%, at least 93%, at least 94%, at least 95%, at least 96%, at least 97%, at least 98%, at least 99% or 100% identity to SEQ ID NO:102, and a second polypeptide having at least 80%, at least 85%, at least 90%, at least 91%, at least 92%, at least 93%, at least 94%, at least 95%, at least 96%, at least 97%, at least 98%, at least 99% or 100% identity to SEQ ID NO:103. In some preferred aspects, the first polypeptide and second polypeptide have at least 90% identity with the corresponding amino acid sequences specified above. As used herein, “at least 90% identity” includes at least 91%, 92%, 93%, 94%, 95%, 96%, 97%, 98%, 99% and 100% identity to the recited reference sequence. In some particularly preferred aspects, the first polypeptide and second polypeptide comprise or consist of the corresponding amino acid sequences specified above.

[0577] In some aspects, an antigen binding polypeptide or antigen binding polypeptide complex provided herein comprises an amino acid sequence having at least 80%, at least 85%, at least 90%, at least 91%, at least 92%, at least 93%, at least 94%, at least 95%, at least 96%, at least 97%, at least 98%, at least 99% or 100% identity to SEQ ID NO:104. In some aspects, an antigen binding polypeptide or antigen binding polypeptide complex provided herein comprises an amino acid sequence having at least 80%, at least 85%, at least 90%, at least 91%, at least 92%, at least 93%, at least 94%, at least 95%, at least 96%, at least 97%, at least 98%, at least 99% or 100% identity to SEQ ID NO:105. In some aspects, an antigen binding polypeptide complex provided herein comprises a first polypeptide having at least 80%, at least 85%, at least 90%, at least 91%, at least 92%, at least 93%, at least 94%, at least 95%, at least 96%, at least 97%, at least 98%, at least 99% or 100% identity to SEQ ID NO:104, and a second polypeptide having at least 80%, at least 85%, at least 90%, at least 91%, at least 92%, at least 93%, at least 94%, at least 95%, at least 96%, at least 97%, at least 98%, at least 99% or 100% identity to SEQ ID NO:105. In some preferred aspects, the first polypeptide and second polypeptide have at least 90% identity with the corresponding amino acid sequences specified above. As used herein, “at least 90% identity” includes at least 91%, 92%, 93%, 94%, 95%, 96%, 97%, 98%, 99% and 100% identity to the recited reference sequence. In some particularly preferred aspects, the first polypeptide and second polypeptide comprise or consist of the corresponding amino acid sequences specified above.

[0578] In some aspects, an antigen binding polypeptide or antigen binding polypeptide complex provided herein comprises an amino acid sequence having at least 80%, at least 85%, at least 90%, at least 91%, at least 92%, at least 93%, at least 94%, at least 95%, at least 96%, at least 97%, at least 98%, at least 99% or 100% identity to SEQ ID NO:106. In some aspects, an antigen binding polypeptide or antigen binding polypeptide complex provided herein comprises an amino acid sequence having at least 80%, at least 85%, at least 90%, at least 91%, at least 92%, at least 93%, at least 94%, at least 95%, at least 96%, at least 97%, at least 98%, at least 99% or 100% identity to SEQ ID NO:107. In some aspects, an antigen binding polypeptide complex provided herein comprises a first polypeptide having at least 80%, at least 85%, at least 90%, at least 91%, at least 92%, at least 93%, at least 94%, at least 95%, at least 96%, at least 97%, at least 98%, at least 99% or 100% identity to SEQ ID NO:106, and a second polypeptide having at least 80%, at least 85%, at least 90%, at least 91%, at least 92%, at least 93%, at least 94%, at least 95%, at least 96%, at least 97%, at least 98%, at least 99% or 100% identity to SEQ ID NO:107. In some preferred aspects, the first polypeptide and second polypeptide have at least 90% identity with the corresponding amino acid sequences specified above. As used herein, “at least 90% identity” includes at least 91%, 92%, 93%, 94%, 95%, 96%, 97%, 98%, 99% and 100% identity to the recited reference sequence. In some particularly preferred aspects, the first polypeptide and second polypeptide comprise or consist of the corresponding amino acid sequences specified above.

[0579] In some aspects, an antigen binding polypeptide or antigen binding polypeptide complex provided herein comprises an amino acid sequence having at least 80%, at least 85%, at least 90%, at least 91%, at least 92%, at least 93%, at least 94%, at least 95%, at least 96%, at least 97%, at least 98%, at least 99% or 100% identity to SEQ ID NO:108. In some aspects, an antigen binding polypeptide or antigen binding polypeptide complex provided herein comprises an amino acid sequence having at least 80%, at least 85%, at least 90%, at least 91%, at least 92%, at least 93%, at least 94%, at least 95%, at least 96%, at least 97%, at least 98%, at least 99% or 100% identity to SEQ ID NO:109. In some aspects, an antigen binding polypeptide complex provided herein comprises a first polypeptide having at least 80%, at least 85%, at least 90%, at least 91%, at least 92%, at least 93%, at least 94%, at least 95%, at least 96%, at least 97%, at least 98%, at least 99% or 100% identity to SEQ ID NO:108, and a second polypeptide having at least 80%, at least 85%, at least 90%, at least 91%, at least 92%, at least 93%, at least 94%, at least 95%, at least 96%, at least 97%, at least 98%, at least 99% or 100% identity to SEQ ID NO:109. In some preferred aspects, the first polypeptide and second polypeptide have at least 90% identity with the corresponding amino acid sequences specified above. As used herein, “at least 90% identity” includes at least 91%, 92%, 93%, 94%, 95%, 96%, 97%, 98%, 99% and 100% identity to the recited reference sequence. In some particularly preferred aspects, the first polypeptide and second polypeptide comprise or consist of the corresponding amino acid sequences specified above.

[0580] In some aspects, an antigen binding polypeptide or antigen binding polypeptide complex provided herein comprises an amino acid sequence having at least 80%, at least 85%, at least 90%, at least 91%, at least 92%, at least 93%, at least 94%, at least 95%, at least 96%, at least 97%, at least 98%, at least 99% or 100% identity to SEQ ID NO:110. In some aspects, an antigen binding polypeptide or antigen binding polypeptide complex provided herein comprises an amino acid sequence having at least 80%, at least 85%, at least 90%, at least 91%, at least 92%, at least 93%, at least 94%, at least 95%, at least 96%, at least 97%, at least 98%, at least 99% or 100% identity to SEQ ID NO:111. In some aspects, an antigen binding polypeptide complex provided herein comprises a first polypeptide having at least 80%, at least 85%, at least 90%, at least 91%, at least 92%, at least 93%, at least 94%, at least 95%, at least 96%, at least 97%, at least 98%, at least 99% or 100% identity to SEQ ID NO:110, and a second polypeptide having at least 80%, at least 85%, at least 90%, at least 91%, at least 92%, at least 93%, at least 94%, at least 95%, at least 96%, at least 97%, at least 98%, at least 99% or 100% identity to SEQ ID NO:111. In some preferred aspects, the first polypeptide and second polypeptide have at least 90% identity with the corresponding amino acid sequences specified above. As used herein, “at least 90% identity” includes at least 91%, 92%, 93%, 94%, 95%, 96%, 97%, 98%, 99% and 100% identity to the recited reference sequence. In some particularly preferred aspects, the first polypeptide and second polypeptide comprise or consist of the corresponding amino acid sequences specified above.

[0581] In some aspects, an antigen binding polypeptide or antigen binding polypeptide complex provided herein comprises an amino acid sequence having at least 80%, at least 85%, at least 90%, at least 91%, at least 92%, at least 93%, at least 94%, at least 95%, at least 96%, at least 97%, at least 98%, at least 99% or 100% identity to SEQ ID NO:112. In some aspects, an antigen binding polypeptide or antigen binding polypeptide complex provided herein comprises an amino acid sequence having at least 80%, at least 85%, at least 90%, at least 91%, at least 92%, at least 93%, at least 94%, at least 95%, at least 96%, at least 97%, at least 98%, at least 99% or 100% identity to SEQ ID NO:113. In some aspects, an antigen binding polypeptide complex provided herein comprises a first polypeptide having at least 80%, at least 85%, at least 90%, at least 91%, at least 92%, at least 93%, at least 94%, at least 95%, at least 96%, at least 97%, at least 98%, at least 99% or 100% identity to SEQ ID NO:112, and a second polypeptide having at least 80%, at least 85%, at least 90%, at least 91%, at least 92%, at least 93%, at least 94%, at least 95%, at least 96%, at least 97%, at least 98%, at least 99% or 100% identity to SEQ ID NO:113. In some aspects, an antigen binding polypeptide complex provided herein comprises a first polypeptide having an amino acid sequence of SEQ ID NO:112, and a second polypeptide having an amino acid sequence of SEQ ID NO:113. In some preferred aspects, the first polypeptide and second polypeptide have at least 90% identity with the corresponding amino acid sequences specified above. As used herein, “at least 90% identity” includes at least 91%, 92%, 93%, 94%, 95%, 96%, 97%, 98%, 99% and 100% identity to the recited reference sequence. In some particularly preferred aspects, the first polypeptide and second polypeptide comprise or consist of the corresponding amino acid sequences specified above.

[0582] In some aspects, an antigen binding polypeptide or antigen binding polypeptide complex provided herein comprises an amino acid sequence encoded by a polynucleotide having at least 80%, at least 85%, at least 90%, at least 91%, at least 92%, at least 93%, at least 94%, at least 95%, at least 96%, at least 97%, at least 98%, at least 99% or 100% identity to any one of SEQ ID NOs:114-150, 292, 296, 298, 300, 302, 304, 306, 308, 310, 312, 314, 316, 318, 320, 322, 324, 326, 328, 330, 332, 334, 336, 338, 340, 342, 344, 346, 348, 350, 352, 354, 356, 358, 360, 362, 364, 366, 368, 370, 372, 374, 376, 378, 380, 382, 384, 386, 388, 390, 392, 393, 394, 396, 398, 400, 402, 404, 406, 408, 410, 412, 414, 416, 418, 420, 422, 424, 426, 428, 430, 432, 434, 436, 438, 440, 442, 444, 446, 448, 450, 452, 454, 456, 458, 460, 462, 464, 466, 468, 470, 472, 474, 476, 478, 480, 482, 484, 486, 488, 490, 492, 494, 496, 498, 500, 502, 504, 506, 507, 671-710 and 755-777. In some preferred aspects, the polynucleotide has at least 90% identity with a corresponding nucleic acid acid sequence specified above. As used herein, “at least 90% identity” includes at least 91%, 92%, 93%, 94%, 95%, 96%, 97%, 98%, 99% and 100% identity to the recited reference sequence. In some particularly preferred aspects, the polynucleotide comprises or consists of a corresponding nucleic acid sequence specified above.

[0583] In some aspects, an antigen binding polypeptide or antigen binding polypeptide complex provided herein comprises an amino acid sequence encoded by a polynucleotide having at least 80%, at least 85%, at least 90%, at least 91%, at least 92%, at least 93%, at least 94%, at least 95%, at least 96%, at least 97%, at least 98%, at least 99% or 100% identity to SEQ ID NO:114. In some aspects, an antigen binding polypeptide complex provided herein comprises a first polypeptide encoded by a polynucleotide having at least 80%, at least 85%, at least 90%, at least 91%, at least 92%, at least 93%, at least 94%, at least 95%, at least 96%, at least 97%, at least 98%, at least 99% or 100% identity to SEQ ID NO:114, and a second polypeptide encoded by a polynucleotide having at least 80%, at least 85%, at least 90%, at least 91%, at least 92%, at least 93%, at least 94%, at least 95%, at least 96%, at least 97%, at least 98%, at least 99% or 100% identity to SEQ ID NO:114. In some preferred aspects, the first polypeptide and the second polypeptide are each encoded by a polynucleotide having at least 90% identity with a corresponding nucleic acid acid sequence specified above. As used herein, “at least 90% identity” includes at least 91%, 92%, 93%, 94%, 95%, 96%, 97%, 98%, 99% and 100% identity to the recited reference sequence. In some particularly preferred aspects, the first polypeptide and the second polypeptide are each encoded by a polynucleotide comprising or consisting of a corresponding nucleic acid sequence specified above.

[0584] In some aspects, an antigen binding polypeptide or antigen binding polypeptide complex provided herein comprises an amino acid sequence encoded by a polynucleotide having at least 80%, at least 85%, at least 90%, at least 91%, at least 92%, at least 93%, at least 94%, at least 95%, at least 96%, at least 97%, at least 98%, at least 99% or 100% identity to SEQ ID NO:115. In some aspects, an antigen binding polypeptide complex provided herein comprises a first polypeptide encoded by a polynucleotide having at least 80%, at least 85%, at least 90%, at least 91%, at least 92%, at least 93%, at least 94%, at least 95%, at least 96%, at least 97%, at least 98%, at least 99% or 100% identity to SEQ ID NO:115, and a second polypeptide encoded by a polynucleotide having at least 80%, at least 85%, at least 90%, at least 91%, at least 92%, at least 93%, at least 94%, at least 95%, at least 96%, at least 97%, at least 98%, at least 99% or 100% identity to SEQ ID NO:115. In some preferred aspects, the first polypeptide and the second polypeptide are each encoded by a polynucleotide having at least 90% identity with a corresponding nucleic acid acid sequence specified above. As used herein, “at least 90% identity” includes at least 91%, 92%, 93%, 94%, 95%, 96%, 97%, 98%, 99% and 100% identity to the recited reference sequence. In some particularly preferred aspects, the first polypeptide and the second polypeptide are each encoded by a polynucleotide comprising or consisting of a corresponding nucleic acid sequence specified above.

[0585] In some aspects, an antigen binding polypeptide or antigen binding polypeptide complex provided herein comprises an amino acid sequence encoded by a polynucleotide having at least 80%, at least 85%, at least 90%, at least 91%, at least 92%, at least 93%, at least 94%, at least 95%, at least 96%, at least 97%, at least 98%, at least 99% or 100% identity to SEQ ID NO:116. In some aspects, an antigen binding polypeptide complex provided herein comprises a first polypeptide encoded by a polynucleotide having at least 80%, at least 85%, at least 90%, at least 91%, at least 92%, at least 93%, at least 94%, at least 95%, at least 96%, at least 97%, at least 98%, at least 99% or 100% identity to SEQ ID NO:116, and a second polypeptide encoded by a polynucleotide having at least 80%, at least 85%, at least 90%, at least 91%, at least 92%, at least 93%, at least 94%, at least 95%, at least 96%, at least 97%, at least 98%, at least 99% or 100% identity to SEQ ID NO:116. In some preferred aspects, the first polypeptide and the second polypeptide are each encoded by a polynucleotide having at least 90% identity with a corresponding nucleic acid acid sequence specified above. As used herein, “at least 90% identity” includes at least 91%, 92%, 93%, 94%, 95%, 96%, 97%, 98%, 99% and 100% identity to the recited reference sequence. In some particularly preferred aspects, the first polypeptide and the second polypeptide are each encoded by a polynucleotide comprising or consisting of a corresponding nucleic acid sequence specified above.

[0586] In some aspects, an antigen binding polypeptide or antigen binding polypeptide complex provided herein comprises an amino acid sequence encoded by a polynucleotide having at least 80%, at least 85%, at least 90%, at least 91%, at least 92%, at least 93%, at least 94%, at least 95%, at least 96%, at least 97%, at least 98%, at least 99% or 100% identity to SEQ ID NO:117. In some aspects, an antigen binding polypeptide complex provided herein comprises a first polypeptide encoded by a polynucleotide having at least 80%, at least 85%, at least 90%, at least 91%, at least 92%, at least 93%, at least 94%, at least 95%, at least 96%, at least 97%, at least 98%, at least 99% or 100% identity to SEQ ID NO:117, and a second polypeptide encoded by a polynucleotide having at least 80%, at least 85%, at least 90%, at least 91%, at least 92%, at least 93%, at least 94%, at least 95%, at least 96%, at least 97%, at least 98%, at least 99% or 100% identity to SEQ ID NO:117. In some preferred aspects, the first polypeptide and the second polypeptide are each encoded by a polynucleotide having at least 90% identity with a corresponding nucleic acid acid sequence specified above. As used herein, “at least 90% identity” includes at least 91%, 92%, 93%, 94%, 95%, 96%, 97%, 98%, 99% and 100% identity to the recited reference sequence. In some particularly preferred aspects, the first polypeptide and the second polypeptide are each encoded by a polynucleotide comprising or consisting of a corresponding nucleic acid sequence specified above.

[0587] In some aspects, an antigen binding polypeptide or antigen binding polypeptide complex provided herein comprises an amino acid sequence encoded by a polynucleotide having at least 80%, at least 85%, at least 90%, at least 91%, at least 92%, at least 93%, at least 94%, at least 95%, at least 96%, at least 97%, at least 98%, at least 99% or 100% identity to SEQ ID NO:118. In some aspects, an antigen binding polypeptide complex provided herein comprises a first polypeptide encoded by a polynucleotide having at least 80%, at least 85%, at least 90%, at least 91%, at least 92%, at least 93%, at least 94%, at least 95%, at least 96%, at least 97%, at least 98%, at least 99% or 100% identity to SEQ ID NO:118, and a second polypeptide encoded by a polynucleotide having at least 80%, at least 85%, at least 90%, at least 91%, at least 92%, at least 93%, at least 94%, at least 95%, at least 96%, at least 97%, at least 98%, at least 99% or 100% identity to SEQ ID NO:118. In some preferred aspects, the first polypeptide and the second polypeptide are each encoded by a polynucleotide having at least 90% identity with a corresponding nucleic acid acid sequence specified above. As used herein, “at least 90% identity” includes at least 91%, 92%, 93%, 94%, 95%, 96%, 97%, 98%, 99% and 100% identity to the recited reference sequence. In some particularly preferred aspects, the first polypeptide and the second polypeptide are each encoded by a polynucleotide comprising or consisting of a corresponding nucleic acid sequence specified above.

[0588] In some aspects, an antigen binding polypeptide or antigen binding polypeptide complex provided herein comprises an amino acid sequence encoded by a polynucleotide having at least 80%, at least 85%, at least 90%, at least 91%, at least 92%, at least 93%, at least 94%, at least 95%, at least 96%, at least 97%, at least 98%, at least 99% or 100% identity to SEQ ID NO:119. In some aspects, an antigen binding polypeptide complex provided herein comprises a first polypeptide encoded by a polynucleotide having at least 80%, at least 85%, at least 90%, at least 91%, at least 92%, at least 93%, at least 94%, at least 95%, at least 96%, at least 97%, at least 98%, at least 99% or 100% identity to SEQ ID NO:119, and a second polypeptide encoded by a polynucleotide having at least 80%, at least 85%, at least 90%, at least 91%, at least 92%, at least 93%, at least 94%, at least 95%, at least 96%, at least 97%, at least 98%, at least 99% or 100% identity to SEQ ID NO:119. In some preferred aspects, the first polypeptide and the second polypeptide are each encoded by a polynucleotide having at least 90% identity with a corresponding nucleic acid acid sequence specified above. As used herein, “at least 90% identity” includes at least 91%, 92%, 93%, 94%, 95%, 96%, 97%, 98%, 99% and 100% identity to the recited reference sequence. In some particularly preferred aspects, the first polypeptide and the second polypeptide are each encoded by a polynucleotide comprising or consisting of a corresponding nucleic acid sequence specified above.

[0589] In some aspects, an antigen binding polypeptide or antigen binding polypeptide complex provided herein comprises an amino acid sequence encoded by a polynucleotide having at least 80%, at least 85%, at least 90%, at least 91%, at least 92%, at least 93%, at least 94%, at least 95%, at least 96%, at least 97%, at least 98%, at least 99% or 100% identity to SEQ ID NO:120. In some aspects, an antigen binding polypeptide complex provided herein comprises a first polypeptide encoded by a polynucleotide having at least 80%, at least 85%, at least 90%, at least 91%, at least 92%, at least 93%, at least 94%, at least 95%, at least 96%, at least 97%, at least 98%, at least 99% or 100% identity to SEQ ID NO:120, and a second polypeptide encoded by a polynucleotide having at least 80%, at least 85%, at least 90%, at least 91%, at least 92%, at least 93%, at least 94%, at least 95%, at least 96%, at least 97%, at least 98%, at least 99% or 100% identity to SEQ ID NO:120. In some preferred aspects, the first polypeptide and the second polypeptide are each encoded by a polynucleotide having at least 90% identity with a corresponding nucleic acid acid sequence specified above. As used herein, “at least 90% identity” includes at least 91%, 92%, 93%, 94%, 95%, 96%, 97%, 98%, 99% and 100% identity to the recited reference sequence. In some particularly preferred aspects, the first polypeptide and the second polypeptide are each encoded by a polynucleotide comprising or consisting of a corresponding nucleic acid sequence specified above.

[0590] In some aspects, an antigen binding polypeptide or antigen binding polypeptide complex provided herein comprises an amino acid sequence encoded by a polynucleotide having at least 80%, at least 85%, at least 90%, at least 91%, at least 92%, at least 93%, at least 94%, at least 95%, at least 96%, at least 97%, at least 98%, at least 99% or 100% identity to SEQ ID NO:121. In some aspects, an antigen binding polypeptide complex provided herein comprises a first polypeptide encoded by a polynucleotide having at least 80%, at least 85%, at least 90%, at least 91%, at least 92%, at least 93%, at least 94%, at least 95%, at least 96%, at least 97%, at least 98%, at least 99% or 100% identity to SEQ ID NO:121, and a second polypeptide encoded by a polynucleotide having at least 80%, at least 85%, at least 90%, at least 91%, at least 92%, at least 93%, at least 94%, at least 95%, at least 96%, at least 97%, at least 98%, at least 99% or 100% identity to SEQ ID NO:121. In some preferred aspects, the first polypeptide and the second polypeptide are each encoded by a polynucleotide having at least 90% identity with a corresponding nucleic acid acid sequence specified above. As used herein, “at least 90% identity” includes at least 91%, 92%, 93%, 94%, 95%, 96%, 97%, 98%, 99% and 100% identity to the recited reference sequence. In some particularly preferred aspects, the first polypeptide and the second polypeptide are each encoded by a polynucleotide comprising or consisting of a corresponding nucleic acid sequence specified above.

[0591] In some aspects, an antigen binding polypeptide or antigen binding polypeptide complex provided herein comprises an amino acid sequence encoded by a polynucleotide having at least 80%, at least 85%, at least 90%, at least 91%, at least 92%, at least 93%, at least 94%, at least 95%, at least 96%, at least 97%, at least 98%, at least 99% or 100% identity to SEQ ID NO:122. In some aspects, an antigen binding polypeptide complex provided herein comprises a first polypeptide encoded by a polynucleotide having at least 80%, at least 85%, at least 90%, at least 91%, at least 92%, at least 93%, at least 94%, at least 95%, at least 96%, at least 97%, at least 98%, at least 99% or 100% identity to SEQ ID NO:122, and a second polypeptide encoded by a polynucleotide having at least 80%, at least 85%, at least 90%, at least 91%, at least 92%, at least 93%, at least 94%, at least 95%, at least 96%, at least 97%, at least 98%, at least 99% or 100% identity to SEQ ID NO:122. In some preferred aspects, the first polypeptide and the second polypeptide are each encoded by a polynucleotide having at least 90% identity with a corresponding nucleic acid acid sequence specified above. As used herein, “at least 90% identity” includes at least 91%, 92%, 93%, 94%, 95%, 96%, 97%, 98%, 99% and 100% identity to the recited reference sequence. In some particularly preferred aspects, the first polypeptide and the second polypeptide are each encoded by a polynucleotide comprising or consisting of a corresponding nucleic acid sequence specified above.

[0592] In some aspects, an antigen binding polypeptide or antigen binding polypeptide complex provided herein comprises an amino acid sequence encoded by a polynucleotide having at least 80%, at least 85%, at least 90%, at least 91%, at least 92%, at least 93%, at least 94%, at least 95%, at least 96%, at least 97%, at least 98%, at least 99% or 100% identity to SEQ ID NO:123. In some aspects, an antigen binding polypeptide complex provided herein comprises a first polypeptide encoded by a polynucleotide having at least 80%, at least 85%, at least 90%, at least 91%, at least 92%, at least 93%, at least 94%, at least 95%, at least 96%, at least 97%, at least 98%, at least 99% or 100% identity to SEQ ID NO:123, and a second polypeptide encoded by a polynucleotide having at least 80%, at least 85%, at least 90%, at least 91%, at least 92%, at least 93%, at least 94%, at least 95%, at least 96%, at least 97%, at least 98%, at least 99% or 100% identity to SEQ ID NO:123. In some preferred aspects, the first polypeptide and the second polypeptide are each encoded by a polynucleotide having at least 90% identity with a corresponding nucleic acid acid sequence specified above. As used herein, “at least 90% identity” includes at least 91%, 92%, 93%, 94%, 95%, 96%, 97%, 98%, 99% and 100% identity to the recited reference sequence. In some particularly preferred aspects, the first polypeptide and the second polypeptide are each encoded by a polynucleotide comprising or consisting of a corresponding nucleic acid sequence specified above.

[0593] In some aspects, an antigen binding polypeptide or antigen binding polypeptide complex provided herein comprises an amino acid sequence encoded by a polynucleotide having at least 80%, at least 85%, at least 90%, at least 91%, at least 92%, at least 93%, at least 94%, at least 95%, at least 96%, at least 97%, at least 98%, at least 99% or 100% identity to SEQ ID NO:124. In some aspects, an antigen binding polypeptide complex provided herein comprises a first polypeptide encoded by a polynucleotide having at least 80%, at least 85%, at least 90%, at least 91%, at least 92%, at least 93%, at least 94%, at least 95%, at least 96%, at least 97%, at least 98%, at least 99% or 100% identity to SEQ ID NO:124, and a second polypeptide encoded by a polynucleotide having at least 80%, at least 85%, at least 90%, at least 91%, at least 92%, at least 93%, at least 94%, at least 95%, at least 96%, at least 97%, at least 98%, at least 99% or 100% identity to SEQ ID NO:124. In some preferred aspects, the first polypeptide and the second polypeptide are each encoded by a polynucleotide having at least 90% identity with a corresponding nucleic acid acid sequence specified above. As used herein, “at least 90% identity” includes at least 91%, 92%, 93%, 94%, 95%, 96%, 97%, 98%, 99% and 100% identity to the recited reference sequence. In some particularly preferred aspects, the first polypeptide and the second polypeptide are each encoded by a polynucleotide comprising or consisting of a corresponding nucleic acid sequence specified above.

[0594] In some aspects, an antigen binding polypeptide or antigen binding polypeptide complex provided herein comprises an amino acid sequence encoded by a polynucleotide having at least 80%, at least 85%, at least 90%, at least 91%, at least 92%, at least 93%, at least 94%, at least 95%, at least 96%, at least 97%, at least 98%, at least 99% or 100% identity to SEQ ID NO:125. In some aspects, an antigen binding polypeptide complex provided herein comprises a first polypeptide encoded by a polynucleotide having at least 80%, at least 85%, at least 90%, at least 91%, at least 92%, at least 93%, at least 94%, at least 95%, at least 96%, at least 97%, at least 98%, at least 99% or 100% identity to SEQ ID NO:125, and a second polypeptide encoded by a polynucleotide having at least 80%, at least 85%, at least 90%, at least 91%, at least 92%, at least 93%, at least 94%, at least 95%, at least 96%, at least 97%, at least 98%, at least 99% or 100% identity to SEQ ID NO:125. In some preferred aspects, the first polypeptide and the second polypeptide are each encoded by a polynucleotide having at least 90% identity with a corresponding nucleic acid acid sequence specified above. As used herein, “at least 90% identity” includes at least 91%, 92%, 93%, 94%, 95%, 96%, 97%, 98%, 99% and 100% identity to the recited reference sequence. In some particularly preferred aspects, the first polypeptide and the second polypeptide are each encoded by a polynucleotide comprising or consisting of a corresponding nucleic acid sequence specified above.

[0595] In some aspects, an antigen binding polypeptide or antigen binding polypeptide complex provided herein comprises an amino acid sequence encoded by a polynucleotide having at least 80%, at least 85%, at least 90%, at least 91%, at least 92%, at least 93%, at least 94%, at least 95%, at least 96%, at least 97%, at least 98%, at least 99% or 100% identity to SEQ ID NO:126. In some aspects, an antigen binding polypeptide complex provided herein comprises a first polypeptide encoded by a polynucleotide having at least 80%, at least 85%, at least 90%, at least 91%, at least 92%, at least 93%, at least 94%, at least 95%, at least 96%, at least 97%, at least 98%, at least 99% or 100% identity to SEQ ID NO:126, and a second polypeptide encoded by a polynucleotide having at least 80%, at least 85%, at least 90%, at least 91%, at least 92%, at least 93%, at least 94%, at least 95%, at least 96%, at least 97%, at least 98%, at least 99% or 100% identity to SEQ ID NO:126. In some preferred aspects, the first polypeptide and the second polypeptide are each encoded by a polynucleotide having at least 90% identity with a corresponding nucleic acid acid sequence specified above. As used herein, “at least 90% identity” includes at least 91%, 92%, 93%, 94%, 95%, 96%, 97%, 98%, 99% and 100% identity to the recited reference sequence. In some particularly preferred aspects, the first polypeptide and the second polypeptide are each encoded by a polynucleotide comprising or consisting of a corresponding nucleic acid sequence specified above.

[0596] In some aspects, an antigen binding polypeptide or antigen binding polypeptide complex provided herein comprises an amino acid sequence encoded by a polynucleotide having at least 80%, at least 85%, at least 90%, at least 91%, at least 92%, at least 93%, at least 94%, at least 95%, at least 96%, at least 97%, at least 98%, at least 99% or 100% identity to SEQ ID NO:127. In some aspects, an antigen binding polypeptide complex provided herein comprises a first polypeptide encoded by a polynucleotide having at least 80%, at least 85%, at least 90%, at least 91%, at least 92%, at least 93%, at least 94%, at least 95%, at least 96%, at least 97%, at least 98%, at least 99% or 100% identity to SEQ ID NO:127, and a second polypeptide encoded by a polynucleotide having at least 80%, at least 85%, at least 90%, at least 91%, at least 92%, at least 93%, at least 94%, at least 95%, at least 96%, at least 97%, at least 98%, at least 99% or 100% identity to SEQ ID NO:127. In some preferred aspects, the first polypeptide and the second polypeptide are each encoded by a polynucleotide having at least 90% identity with a corresponding nucleic acid acid sequence specified above. As used herein, “at least 90% identity” includes at least 91%, 92%, 93%, 94%, 95%, 96%, 97%, 98%, 99% and 100% identity to the recited reference sequence. In some particularly preferred aspects, the first polypeptide and the second polypeptide are each encoded by a polynucleotide comprising or consisting of a corresponding nucleic acid sequence specified above.

[0597] In some aspects, an antigen binding polypeptide or antigen binding polypeptide complex provided herein comprises an amino acid sequence encoded by a polynucleotide having at least 80%, at least 85%, at least 90%, at least 91%, at least 92%, at least 93%, at least 94%, at least 95%, at least 96%, at least 97%, at least 98%, at least 99% or 100% identity to SEQ ID NO:128. In some aspects, an antigen binding polypeptide complex provided herein comprises a first polypeptide encoded by a polynucleotide having at least 80%, at least 85%, at least 90%, at least 91%, at least 92%, at least 93%, at least 94%, at least 95%, at least 96%, at least 97%, at least 98%, at least 99% or 100% identity to SEQ ID NO:128, and a second polypeptide encoded by a polynucleotide having at least 80%, at least 85%, at least 90%, at least 91%, at least 92%, at least 93%, at least 94%, at least 95%, at least 96%, at least 97%, at least 98%, at least 99% or 100% identity to SEQ ID NO:128. In some preferred aspects, the first polypeptide and the second polypeptide are each encoded by a polynucleotide having at least 90% identity with a corresponding nucleic acid acid sequence specified above. As used herein, “at least 90% identity” includes at least 91%, 92%, 93%, 94%, 95%, 96%, 97%, 98%, 99% and 100% identity to the recited reference sequence. In some particularly preferred aspects, the first polypeptide and the second polypeptide are each encoded by a polynucleotide comprising or consisting of a corresponding nucleic acid sequence specified above.

[0598] In some aspects, an antigen binding polypeptide or antigen binding polypeptide complex provided herein comprises an amino acid sequence encoded by a polynucleotide having at least 80%, at least 85%, at least 90%, at least 91%, at least 92%, at least 93%, at least 94%, at least 95%, at least 96%, at least 97%, at least 98%, at least 99% or 100% identity to SEQ ID NO:129. In some aspects, an antigen binding polypeptide complex provided herein comprises a first polypeptide encoded by a polynucleotide having at least 80%, at least 85%, at least 90%, at least 91%, at least 92%, at least 93%, at least 94%, at least 95%, at least 96%, at least 97%, at least 98%, at least 99% or 100% identity to SEQ ID NO:129, and a second polypeptide encoded by a polynucleotide having at least 80%, at least 85%, at least 90%, at least 91%, at least 92%, at least 93%, at least 94%, at least 95%, at least 96%, at least 97%, at least 98%, at least 99% or 100% identity to SEQ ID NO:129. In some preferred aspects, the first polypeptide and the second polypeptide are each encoded by a polynucleotide having at least 90% identity with a corresponding nucleic acid acid sequence specified above. As used herein, “at least 90% identity” includes at least 91%, 92%, 93%, 94%, 95%, 96%, 97%, 98%, 99% and 100% identity to the recited reference sequence. In some particularly preferred aspects, the first polypeptide and the second polypeptide are each encoded by a polynucleotide comprising or consisting of a corresponding nucleic acid sequence specified above.

[0599] In some aspects, an antigen binding polypeptide or antigen binding polypeptide complex provided herein comprises an amino acid sequence encoded by a polynucleotide having at least 80%, at least 85%, at least 90%, at least 91%, at least 92%, at least 93%, at least 94%, at least 95%, at least 96%, at least 97%, at least 98%, at least 99% or 100% identity to SEQ ID NO:130. In some aspects, an antigen binding polypeptide complex provided herein comprises a first polypeptide encoded by a polynucleotide having at least 80%, at least 85%, at least 90%, at least 91%, at least 92%, at least 93%, at least 94%, at least 95%, at least 96%, at least 97%, at least 98%, at least 99% or 100% identity to SEQ ID NO:130, and a second polypeptide encoded by a polynucleotide having at least 80%, at least 85%, at least 90%, at least 91%, at least 92%, at least 93%, at least 94%, at least 95%, at least 96%, at least 97%, at least 98%, at least 99% or 100% identity to SEQ ID NO:130. In some preferred aspects, the first polypeptide and the second polypeptide are each encoded by a polynucleotide having at least 90% identity with a corresponding nucleic acid acid sequence specified above. As used herein, “at least 90% identity” includes at least 91%, 92%, 93%, 94%, 95%, 96%, 97%, 98%, 99% and 100% identity to the recited reference sequence. In some particularly preferred aspects, the first polypeptide and the second polypeptide are each encoded by a polynucleotide comprising or consisting of a corresponding nucleic acid sequence specified above.

[0600] In some aspects, an antigen binding polypeptide or antigen binding polypeptide complex provided herein comprises an amino acid sequence encoded by a polynucleotide having at least 80%, at least 85%, at least 90%, at least 91%, at least 92%, at least 93%, at least 94%, at least 95%, at least 96%, at least 97%, at least 98%, at least 99% or 100% identity to SEQ ID NO:131. In some aspects, an antigen binding polypeptide complex provided herein comprises a first polypeptide encoded by a polynucleotide having at least 80%, at least 85%, at least 90%, at least 91%, at least 92%, at least 93%, at least 94%, at least 95%, at least 96%, at least 97%, at least 98%, at least 99% or 100% identity to SEQ ID NO:131, and a second polypeptide encoded by a polynucleotide having at least 80%, at least 85%, at least 90%, at least 91%, at least 92%, at least 93%, at least 94%, at least 95%, at least 96%, at least 97%, at least 98%, at least 99% or 100% identity to SEQ ID NO:131. In some preferred aspects, the first polypeptide and the second polypeptide are each encoded by a polynucleotide having at least 90% identity with a corresponding nucleic acid acid sequence specified above. As used herein, “at least 90% identity” includes at least 91%, 92%, 93%, 94%, 95%, 96%, 97%, 98%, 99% and 100% identity to the recited reference sequence. In some particularly preferred aspects, the first polypeptide and the second polypeptide are each encoded by a polynucleotide comprising or consisting of a corresponding nucleic acid sequence specified above.

[0601] In some aspects, an antigen binding polypeptide or antigen binding polypeptide complex provided herein comprises an amino acid sequence encoded by a polynucleotide having at least 80%, at least 85%, at least 90%, at least 91%, at least 92%, at least 93%, at least 94%, at least 95%, at least 96%, at least 97%, at least 98%, at least 99% or 100% identity to SEQ ID NO:132. In some aspects, an antigen binding polypeptide complex provided herein comprises a first polypeptide encoded by a polynucleotide having at least 80%, at least 85%, at least 90%, at least 91%, at least 92%, at least 93%, at least 94%, at least 95%, at least 96%, at least 97%, at least 98%, at least 99% or 100% identity to SEQ ID NO:132, and a second polypeptide encoded by a polynucleotide having at least 80%, at least 85%, at least 90%, at least 91%, at least 92%, at least 93%, at least 94%, at least 95%, at least 96%, at least 97%, at least 98%, at least 99% or 100% identity to SEQ ID NO:132. In some preferred aspects, the first polypeptide and the second polypeptide are each encoded by a polynucleotide having at least 90% identity with a corresponding nucleic acid acid sequence specified above. As used herein, “at least 90% identity” includes at least 91%, 92%, 93%, 94%, 95%, 96%, 97%, 98%, 99% and 100% identity to the recited reference sequence. In some particularly preferred aspects, the first polypeptide and the second polypeptide are each encoded by a polynucleotide comprising or consisting of a corresponding nucleic acid sequence specified above.

[0602] In some aspects, an antigen binding polypeptide or antigen binding polypeptide complex provided herein comprises an amino acid sequence encoded by a polynucleotide having at least 80%, at least 85%, at least 90%, at least 91%, at least 92%, at least 93%, at least 94%, at least 95%, at least 96%, at least 97%, at least 98%, at least 99% or 100% identity to SEQ ID NO:133. In some aspects, an antigen binding polypeptide complex provided herein comprises a first polypeptide encoded by a polynucleotide having at least 80%, at least 85%, at least 90%, at least 91%, at least 92%, at least 93%, at least 94%, at least 95%, at least 96%, at least 97%, at least 98%, at least 99% or 100% identity to SEQ ID NO:133, and a second polypeptide encoded by a polynucleotide having at least 80%, at least 85%, at least 90%, at least 91%, at least 92%, at least 93%, at least 94%, at least 95%, at least 96%, at least 97%, at least 98%, at least 99% or 100% identity to SEQ ID NO:133. In some preferred aspects, the first polypeptide and the second polypeptide are each encoded by a polynucleotide having at least 90% identity with a corresponding nucleic acid acid sequence specified above. As used herein, “at least 90% identity” includes at least 91%, 92%, 93%, 94%, 95%, 96%, 97%, 98%, 99% and 100% identity to the recited reference sequence. In some particularly preferred aspects, the first polypeptide and the second polypeptide are each encoded by a polynucleotide comprising or consisting of a corresponding nucleic acid sequence specified above.

[0603] In some aspects, an antigen binding polypeptide or antigen binding polypeptide complex provided herein comprises an amino acid sequence encoded by a polynucleotide having at least 80%, at least 85%, at least 90%, at least 91%, at least 92%, at least 93%, at least 94%, at least 95%, at least 96%, at least 97%, at least 98%, at least 99% or 100% identity to SEQ ID NO:134. In some aspects, an antigen binding polypeptide or antigen binding polypeptide complex provided herein comprises an amino acid sequence encoded by a polynucleotide having at least 80%, at least 85%, at least 90%, at least 91%, at least 92%, at least 93%, at least 94%, at least 95%, at least 96%, at least 97%, at least 98%, at least 99% or 100% identity to SEQ ID NO:135. In some aspects, an antigen binding polypeptide complex provided herein comprises a first polypeptide encoded by a polynucleotide having at least 80%, at least 85%, at least 90%, at least 91%, at least 92%, at least 93%, at least 94%, at least 95%, at least 96%, at least 97%, at least 98%, at least 99% or 100% identity to SEQ ID NO:134, and a second polypeptide encoded by a polynucleotide having at least 80%, at least 85%, at least 90%, at least 91%, at least 92%, at least 93%, at least 94%, at least 95%, at least 96%, at least 97%, at least 98%, at least 99% or 100% identity to SEQ ID NO:135. In some preferred aspects, the first polypeptide and the second polypeptide are each encoded by a polynucleotide having at least 90% identity with a corresponding nucleic acid acid sequence specified above. As used herein, “at least 90% identity” includes at least 91%, 92%, 93%, 94%, 95%, 96%, 97%, 98%, 99% and 100% identity to the recited reference sequence. In some particularly preferred aspects, the first polypeptide and the second polypeptide are each encoded by a polynucleotide comprising or consisting of a corresponding nucleic acid sequence specified above.

[0604] In some aspects, an antigen binding polypeptide or antigen binding polypeptide complex provided herein comprises an amino acid sequence encoded by a polynucleotide having at least 80%, at least 85%, at least 90%, at least 91%, at least 92%, at least 93%, at least 94%, at least 95%, at least 96%, at least 97%, at least 98%, at least 99% or 100% identity to SEQ ID NO:136. In some aspects, an antigen binding polypeptide or antigen binding polypeptide complex provided herein comprises an amino acid sequence encoded by a polynucleotide having at least 80%, at least 85%, at least 90%, at least 91%, at least 92%, at least 93%, at least 94%, at least 95%, at least 96%, at least 97%, at least 98%, at least 99% or 100% identity to SEQ ID NO:137. In some aspects, an antigen binding polypeptide complex provided herein comprises a first polypeptide encoded by a polynucleotide having at least 80%, at least 85%, at least 90%, at least 91%, at least 92%, at least 93%, at least 94%, at least 95%, at least 96%, at least 97%, at least 98%, at least 99% or 100% identity to SEQ ID NO:136, and a second polypeptide encoded by a polynucleotide having at least 80%, at least 85%, at least 90%, at least 91%, at least 92%, at least 93%, at least 94%, at least 95%, at least 96%, at least 97%, at least 98%, at least 99% or 100% identity to SEQ ID NO:137. In some preferred aspects, the first polypeptide and the second polypeptide are each encoded by a polynucleotide having at least 90% identity with the corresponding nucleic acid acid sequences specified above. As used herein, “at least 90% identity” includes at least 91%, 92%, 93%, 94%, 95%, 96%, 97%, 98%, 99% and 100% identity to the recited reference sequence. In some particularly preferred aspects, the first polypeptide and the second polypeptide are each encoded by a polynucleotide comprising or consisting of the corresponding nucleic acid sequences specified above.

[0605] In some aspects, an antigen binding polypeptide or antigen binding polypeptide complex provided herein comprises an amino acid sequence encoded by a polynucleotide having at least 80%, at least 85%, at least 90%, at least 91%, at least 92%, at least 93%, at least 94%, at least 95%, at least 96%, at least 97%, at least 98%, at least 99% or 100% identity to SEQ ID NO:138. In some aspects, an antigen binding polypeptide or antigen binding polypeptide complex provided herein comprises an amino acid sequence encoded by a polynucleotide having at least 80%, at least 85%, at least 90%, at least 91%, at least 92%, at least 93%, at least 94%, at least 95%, at least 96%, at least 97%, at least 98%, at least 99% or 100% identity to SEQ ID NO:139. In some aspects, an antigen binding polypeptide complex provided herein comprises a first polypeptide encoded by a polynucleotide having at least 80%, at least 85%, at least 90%, at least 91%, at least 92%, at least 93%, at least 94%, at least 95%, at least 96%, at least 97%, at least 98%, at least 99% or 100% identity to SEQ ID NO:138, and a second polypeptide encoded by a polynucleotide having at least 80%, at least 85%, at least 90%, at least 91%, at least 92%, at least 93%, at least 94%, at least 95%, at least 96%, at least 97%, at least 98%, at least 99% or 100% identity to SEQ ID NO:139. In some preferred aspects, the first polypeptide and the second polypeptide are each encoded by a polynucleotide having at least 90% identity with the corresponding nucleic acid acid sequences specified above. As used herein, “at least 90% identity” includes at least 91%, 92%, 93%, 94%, 95%, 96%, 97%, 98%, 99% and 100% identity to the recited reference sequence. In some particularly preferred aspects, the first polypeptide and the second polypeptide are each encoded by a polynucleotide comprising or consisting of the corresponding nucleic acid sequences specified above.

[0606] In some aspects, an antigen binding polypeptide or antigen binding polypeptide complex provided herein comprises an amino acid sequence encoded by a polynucleotide having at least 80%, at least 85%, at least 90%, at least 91%, at least 92%, at least 93%, at least 94%, at least 95%, at least 96%, at least 97%, at least 98%, at least 99% or 100% identity to SEQ ID NO:140. In some aspects, an antigen binding polypeptide or antigen binding polypeptide complex provided herein comprises an amino acid sequence encoded by a polynucleotide having at least 80%, at least 85%, at least 90%, at least 91%, at least 92%, at least 93%, at least 94%, at least 95%, at least 96%, at least 97%, at least 98%, at least 99% or 100% identity to SEQ ID NO:141. In some aspects, an antigen binding polypeptide complex provided herein comprises a first polypeptide encoded by a polynucleotide having at least 80%, at least 85%, at least 90%, at least 91%, at least 92%, at least 93%, at least 94%, at least 95%, at least 96%, at least 97%, at least 98%, at least 99% or 100% identity to SEQ ID NO:140, and a second polypeptide encoded by a polynucleotide having at least 80%, at least 85%, at least 90%, at least 91%, at least 92%, at least 93%, at least 94%, at least 95%, at least 96%, at least 97%, at least 98%, at least 99% or 100% identity to SEQ ID NO:141. In some preferred aspects, the first polypeptide and the second polypeptide are each encoded by a polynucleotide having at least 90% identity with the corresponding nucleic acid acid sequences specified above. As used herein, “at least 90% identity” includes at least 91%, 92%, 93%, 94%, 95%, 96%, 97%, 98%, 99% and 100% identity to the recited reference sequence. In some particularly preferred aspects, the first polypeptide and the second polypeptide are each encoded by a polynucleotide comprising or consisting of the corresponding nucleic acid sequences specified above.

[0607] In some aspects, an antigen binding polypeptide or antigen binding polypeptide complex provided herein comprises an amino acid sequence encoded by a polynucleotide having at least 80%, at least 85%, at least 90%, at least 91%, at least 92%, at least 93%, at least 94%, at least 95%, at least 96%, at least 97%, at least 98%, at least 99% or 100% identity to SEQ ID NO:142. In some aspects, an antigen binding polypeptide or antigen binding polypeptide complex provided herein comprises an amino acid sequence encoded by a polynucleotide having at least 80%, at least 85%, at least 90%, at least 91%, at least 92%, at least 93%, at least 94%, at least 95%, at least 96%, at least 97%, at least 98%, at least 99% or 100% identity to SEQ ID NO:143. In some aspects, an antigen binding polypeptide complex provided herein comprises a first polypeptide encoded by a polynucleotide having at least 80%, at least 85%, at least 90%, at least 91%, at least 92%, at least 93%, at least 94%, at least 95%, at least 96%, at least 97%, at least 98%, at least 99% or 100% identity to SEQ ID NO:142, and a second polypeptide encoded by a polynucleotide having at least 80%, at least 85%, at least 90%, at least 91%, at least 92%, at least 93%, at least 94%, at least 95%, at least 96%, at least 97%, at least 98%, at least 99% or 100% identity to SEQ ID NO:143. In some preferred aspects, the first polypeptide and the second polypeptide are each encoded by a polynucleotide having at least 90% identity with the corresponding nucleic acid acid sequences specified above. As used herein, “at least 90% identity” includes at least 91%, 92%, 93%, 94%, 95%, 96%, 97%, 98%, 99% and 100% identity to the recited reference sequence. In some particularly preferred aspects, the first polypeptide and the second polypeptide are each encoded by a polynucleotide comprising or consisting of the corresponding nucleic acid sequences specified above.

[0608] In some aspects, an antigen binding polypeptide or antigen binding polypeptide complex provided herein comprises an amino acid sequence encoded by a polynucleotide having at least 80%, at least 85%, at least 90%, at least 91%, at least 92%, at least 93%, at least 94%, at least 95%, at least 96%, at least 97%, at least 98%, at least 99% or 100% identity to SEQ ID NO:144. In some aspects, an antigen binding polypeptide or antigen binding polypeptide complex provided herein comprises an amino acid sequence encoded by a polynucleotide having at least 80%, at least 85%, at least 90%, at least 91%, at least 92%, at least 93%, at least 94%, at least 95%, at least 96%, at least 97%, at least 98%, at least 99% or 100% identity to SEQ ID NO:145. In some aspects, an antigen binding polypeptide complex provided herein comprises a first polypeptide encoded by a polynucleotide having at least 80%, at least 85%, at least 90%, at least 91%, at least 92%, at least 93%, at least 94%, at least 95%, at least 96%, at least 97%, at least 98%, at least 99% or 100% identity to SEQ ID NO:144, and a second polypeptide encoded by a polynucleotide having at least 80%, at least 85%, at least 90%, at least 91%, at least 92%, at least 93%, at least 94%, at least 95%, at least 96%, at least 97%, at least 98%, at least 99% or 100% identity to SEQ ID NO:145. In some preferred aspects, the first polypeptide and the second polypeptide are each encoded by a polynucleotide having at least 90% identity with the corresponding nucleic acid acid sequences specified above. As used herein, “at least 90% identity” includes at least 91%, 92%, 93%, 94%, 95%, 96%, 97%, 98%, 99% and 100% identity to the recited reference sequence. In some particularly preferred aspects, the first polypeptide and the second polypeptide are each encoded by a polynucleotide comprising or consisting of the corresponding nucleic acid sequences specified above.

[0609] In some aspects, an antigen binding polypeptide or antigen binding polypeptide complex provided herein comprises an amino acid sequence encoded by a polynucleotide having at least 80%, at least 85%, at least 90%, at least 91%, at least 92%, at least 93%, at least 94%, at least 95%, at least 96%, at least 97%, at least 98%, at least 99% or 100% identity to SEQ ID NO:146. In some aspects, an antigen binding polypeptide or antigen binding polypeptide complex provided herein comprises an amino acid sequence encoded by a polynucleotide having at least 80%, at least 85%, at least 90%, at least 91%, at least 92%, at least 93%, at least 94%, at least 95%, at least 96%, at least 97%, at least 98%, at least 99% or 100% identity to SEQ ID NO:147. In some aspects, an antigen binding polypeptide complex provided herein comprises a first polypeptide encoded by a polynucleotide having at least 80%, at least 85%, at least 90%, at least 91%, at least 92%, at least 93%, at least 94%, at least 95%, at least 96%, at least 97%, at least 98%, at least 99% or 100% identity to SEQ ID NO:146, and a second polypeptide encoded by a polynucleotide having at least 80%, at least 85%, at least 90%, at least 91%, at least 92%, at least 93%, at least 94%, at least 95%, at least 96%, at least 97%, at least 98%, at least 99% or 100% identity to SEQ ID NO:147. In some preferred aspects, the first polypeptide and the second polypeptide are each encoded by a polynucleotide having at least 90% identity with the corresponding nucleic acid acid sequences specified above. As used herein, “at least 90% identity” includes at least 91%, 92%, 93%, 94%, 95%, 96%, 97%, 98%, 99% and 100% identity to the recited reference sequence. In some particularly preferred aspects, the first polypeptide and the second polypeptide are each encoded by a polynucleotide comprising or consisting of the corresponding nucleic acid sequences specified above.

[0610] In some aspects, an antigen binding polypeptide or antigen binding polypeptide complex provided herein comprises an amino acid sequence encoded by a polynucleotide having at least 80%, at least 85%, at least 90%, at least 91%, at least 92%, at least 93%, at least 94%, at least 95%, at least 96%, at least 97%, at least 98%, at least 99% or 100% identity to SEQ ID NO:148. In some aspects, an antigen binding polypeptide or antigen binding polypeptide complex provided herein comprises an amino acid sequence encoded by a polynucleotide having at least 80%, at least 85%, at least 90%, at least 91%, at least 92%, at least 93%, at least 94%, at least 95%, at least 96%, at least 97%, at least 98%, at least 99% or 100% identity to SEQ ID NO:149. In some aspects, an antigen binding polypeptide complex provided herein comprises a first polypeptide encoded by a polynucleotide having at least 80%, at least 85%, at least 90%, at least 91%, at least 92%, at least 93%, at least 94%, at least 95%, at least 96%, at least 97%, at least 98%, at least 99% or 100% identity to SEQ ID NO:148, and a second polypeptide encoded by a polynucleotide having at least 80%, at least 85%, at least 90%, at least 91%, at least 92%, at least 93%, at least 94%, at least 95%, at least 96%, at least 97%, at least 98%, at least 99% or 100% identity to SEQ ID NO:149. In some aspects, an antigen binding polypeptide complex provided herein comprises a first polypeptide encoded by the polynucleotide of SEQ ID NO:148, and a second polypeptide encoded by the polynucleotide of SEQ ID NO:149. In some preferred aspects, the first polypeptide and the second polypeptide are each encoded by a polynucleotide having at least 90% identity with the corresponding nucleic acid acid sequences specified above. As used herein, “at least 90% identity” includes at least 91%, 92%, 93%, 94%, 95%, 96%, 97%, 98%, 99% and 100% identity to the recited reference sequence. In some particularly preferred aspects, the first polypeptide and the second polypeptide are each encoded by a polynucleotide comprising or consisting of the corresponding nucleic acid sequences specified above.

[0611] In some aspects, an antigen binding polypeptide or antigen binding polypeptide complex provided herein comprises an amino acid sequence encoded by a polynucleotide having at least 80%, at least 85%, at least 90%, at least 91%, at least 92%, at least 93%, at least 94%, at least 95%, at least 96%, at least 97%, at least 98%, at least 99% or 100% identity to SEQ ID NO:671 or 672. In some aspects, an antigen binding polypeptide complex provided herein comprises a first polypeptide encoded by a polynucleotide having at least 80%, at least 85%, at least 90%, at least 91%, at least 92%, at least 93%, at least 94%, at least 95%, at least 96%, at least 97%, at least 98%, at least 99% or 100% identity to SEQ ID NO:671 or 672, and a second polypeptide encoded by a polynucleotide having at least 80%, at least 85%, at least 90%, at least 91%, at least 92%, at least 93%, at least 94%, at least 95%, at least 96%, at least 97%, at least 98%, at least 99% or 100% identity to SEQ ID NO:671 or 672. In some aspects, an antigen binding polypeptide complex provided herein comprises a first polypeptide encoded by the polynucleotide of SEQ ID NO:671 or 672, and a second polypeptide encoded by the polynucleotide of SEQ ID NO:671 or 672. In some preferred aspects, the first polypeptide and the second polypeptide are each encoded by a polynucleotide having at least 90% identity with a corresponding nucleic acid acid sequence specified above. As used herein, “at least 90% identity” includes at least 91%, 92%, 93%, 94%, 95%, 96%, 97%, 98%, 99% and 100% identity to the recited reference sequence. In some particularly preferred aspects, the first polypeptide and the second polypeptide are each encoded by a polynucleotide comprising or consisting of a corresponding nucleic acid sequence specified above.

[0612] In some aspects, an antigen binding polypeptide or antigen binding polypeptide complex provided herein comprises an amino acid sequence encoded by a polynucleotide having at least 80%, at least 85%, at least 90%, at least 91%, at least 92%, at least 93%, at least 94%, at least 95%, at least 96%, at least 97%, at least 98%, at least 99% or 100% identity to SEQ ID NO:673 or 674. In some aspects, an antigen binding polypeptide complex provided herein comprises a first polypeptide encoded by a polynucleotide having at least 80%, at least 85%, at least 90%, at least 91%, at least 92%, at least 93%, at least 94%, at least 95%, at least 96%, at least 97%, at least 98%, at least 99% or 100% identity to SEQ ID NO:673 or 674, and a second polypeptide encoded by a polynucleotide having at least 80%, at least 85%, at least 90%, at least 91%, at least 92%, at least 93%, at least 94%, at least 95%, at least 96%, at least 97%, at least 98%, at least 99% or 100% identity to SEQ ID NO:673 or 674. In some aspects, an antigen binding polypeptide complex provided herein comprises a first polypeptide encoded by the polynucleotide of SEQ ID NO:673 or 674, and a second polypeptide encoded by the polynucleotide of SEQ ID NO:673 or 674. In some preferred aspects, the first polypeptide and the second polypeptide are each encoded by a polynucleotide having at least 90% identity with a corresponding nucleic acid acid sequence specified above. As used herein, “at least 90% identity” includes at least 91%, 92%, 93%, 94%, 95%, 96%, 97%, 98%, 99% and 100% identity to the recited reference sequence. In some particularly preferred aspects, the first polypeptide and the second polypeptide are each encoded by a polynucleotide comprising or consisting of a corresponding nucleic acid sequence specified above.

[0613] In some aspects, an antigen binding polypeptide or antigen binding polypeptide complex provided herein comprises an amino acid sequence encoded by a polynucleotide having at least 80%, at least 85%, at least 90%, at least 91%, at least 92%, at least 93%, at least 94%, at least 95%, at least 96%, at least 97%, at least 98%, at least 99% or 100% identity to SEQ ID NO:675 or 676. In some aspects, an antigen binding polypeptide complex provided herein comprises a first polypeptide encoded by a polynucleotide having at least 80%, at least 85%, at least 90%, at least 91%, at least 92%, at least 93%, at least 94%, at least 95%, at least 96%, at least 97%, at least 98%, at least 99% or 100% identity to SEQ ID NO:675 or 676, and a second polypeptide encoded by a polynucleotide having at least 80%, at least 85%, at least 90%, at least 91%, at least 92%, at least 93%, at least 94%, at least 95%, at least 96%, at least 97%, at least 98%, at least 99% or 100% identity to SEQ ID NO:675 or 676. In some aspects, an antigen binding polypeptide complex provided herein comprises a first polypeptide encoded by the polynucleotide of SEQ ID NO:675 or 676, and a second polypeptide encoded by the polynucleotide of SEQ ID NO:675 or 676 In some preferred aspects, the first polypeptide and the second polypeptide are each encoded by a polynucleotide having at least 90% identity with a corresponding nucleic acid acid sequence specified above. As used herein, “at least 90% identity” includes at least 91%, 92%, 93%, 94%, 95%, 96%, 97%, 98%, 99% and 100% identity to the recited reference sequence. In some particularly preferred aspects, the first polypeptide and the second polypeptide are each encoded by a polynucleotide comprising or consisting of a corresponding nucleic acid sequence specified above.

[0614] In some aspects, an antigen binding polypeptide or antigen binding polypeptide complex provided herein comprises an amino acid sequence encoded by a polynucleotide having at least 80%, at least 85%, at least 90%, at least 91%, at least 92%, at least 93%, at least 94%, at least 95%, at least 96%, at least 97%, at least 98%, at least 99% or 100% identity to SEQ ID NO:677 or 678. In some aspects, an antigen binding polypeptide complex provided herein comprises a first polypeptide encoded by a polynucleotide having at least 80%, at least 85%, at least 90%, at least 91%, at least 92%, at least 93%, at least 94%, at least 95%, at least 96%, at least 97%, at least 98%, at least 99% or 100% identity to SEQ ID NO:677 or 678, and a second polypeptide encoded by a polynucleotide having at least 80%, at least 85%, at least 90%, at least 91%, at least 92%, at least 93%, at least 94%, at least 95%, at least 96%, at least 97%, at least 98%, at least 99% or 100% identity to SEQ ID NO:677 or 678. In some aspects, an antigen binding polypeptide complex provided herein comprises a first polypeptide encoded by the polynucleotide of SEQ ID NO:677 or 678, and a second polypeptide encoded by the polynucleotide of SEQ ID NO:677 or 678. In some preferred aspects, the first polypeptide and the second polypeptide are each encoded by a polynucleotide having at least 90% identity with a corresponding nucleic acid acid sequence specified above. As used herein, “at least 90% identity” includes at least 91%, 92%, 93%, 94%, 95%, 96%, 97%, 98%, 99% and 100% identity to the recited reference sequence. In some particularly preferred aspects, the first polypeptide and the second polypeptide are each encoded by a polynucleotide comprising or consisting of a corresponding nucleic acid sequence specified above.

[0615] In some aspects, an antigen binding polypeptide or antigen binding polypeptide complex provided herein comprises an amino acid sequence encoded by a polynucleotide having at least 80%, at least 85%, at least 90%, at least 91%, at least 92%, at least 93%, at least 94%, at least 95%, at least 96%, at least 97%, at least 98%, at least 99% or 100% identity to SEQ ID NO:679 or 680. In some aspects, an antigen binding polypeptide or antigen binding polypeptide complex provided herein comprises an amino acid sequence encoded by a polynucleotide having at least 80%, at least 85%, at least 90%, at least 91%, at least 92%, at least 93%, at least 94%, at least 95%, at least 96%, at least 97%, at least 98%, at least 99% or 100% identity to SEQ ID NO:681 or 682. In some aspects, an antigen binding polypeptide complex provided herein comprises a first polypeptide encoded by a polynucleotide having at least 80%, at least 85%, at least 90%, at least 91%, at least 92%, at least 93%, at least 94%, at least 95%, at least 96%, at least 97%, at least 98%, at least 99% or 100% identity to SEQ ID NO:679 or 680, and a second polypeptide encoded by a polynucleotide having at least 80%, at least 85%, at least 90%, at least 91%, at least 92%, at least 93%, at least 94%, at least 95%, at least 96%, at least 97%, at least 98%, at least 99% or 100% identity to SEQ ID NO:681 or 682. In some aspects, an antigen binding polypeptide complex provided herein comprises a first polypeptide encoded by the polynucleotide of SEQ ID NO:679 or 680, and a second polypeptide encoded by the polynucleotide of SEQ ID NO:681 or 682. In some preferred aspects, the first polypeptide and the second polypeptide are each encoded by a polynucleotide having at least 90% identity with a corresponding nucleic acid acid sequence specified above. As used herein, “at least 90% identity” includes at least 91%, 92%, 93%, 94%, 95%, 96%, 97%, 98%, 99% and 100% identity to the recited reference sequence. In some particularly preferred aspects, the first polypeptide and the second polypeptide are each encoded by a polynucleotide comprising or consisting of a corresponding nucleic acid sequence specified above.

[0616] In some aspects, an antigen binding polypeptide or antigen binding polypeptide complex provided herein comprises an amino acid sequence encoded by a polynucleotide having at least 80%, at least 85%, at least 90%, at least 91%, at least 92%, at least 93%, at least 94%, at least 95%, at least 96%, at least 97%, at least 98%, at least 99% or 100% identity to SEQ ID NO:683 or 684. In some aspects, an antigen binding polypeptide or antigen binding polypeptide complex provided herein comprises an amino acid sequence encoded by a polynucleotide having at least 80%, at least 85%, at least 90%, at least 91%, at least 92%, at least 93%, at least 94%, at least 95%, at least 96%, at least 97%, at least 98%, at least 99% or 100% identity to SEQ ID NO:685 or 686. In some aspects, an antigen binding polypeptide complex provided herein comprises a first polypeptide encoded by a polynucleotide having at least 80%, at least 85%, at least 90%, at least 91%, at least 92%, at least 93%, at least 94%, at least 95%, at least 96%, at least 97%, at least 98%, at least 99% or 100% identity to SEQ ID NO:683 or 684, and a second polypeptide encoded by a polynucleotide having at least 80%, at least 85%, at least 90%, at least 91%, at least 92%, at least 93%, at least 94%, at least 95%, at least 96%, at least 97%, at least 98%, at least 99% or 100% identity to SEQ ID NO:685 or 686. In some aspects, an antigen binding polypeptide complex provided herein comprises a first polypeptide encoded by the polynucleotide of SEQ ID NO:683 or 684, and a second polypeptide encoded by the polynucleotide of SEQ ID NO:685 or 686. In some preferred aspects, the first polypeptide and the second polypeptide are each encoded by a polynucleotide having at least 90% identity with a corresponding nucleic acid acid sequence specified above. As used herein, “at least 90% identity” includes at least 91%, 92%, 93%, 94%, 95%, 96%, 97%, 98%, 99% and 100% identity to the recited reference sequence. In some particularly preferred aspects, the first polypeptide and the second polypeptide are each encoded by a polynucleotide comprising or consisting of a corresponding nucleic acid sequence specified above.

[0617] In some aspects, an antigen binding polypeptide or antigen binding polypeptide complex provided herein comprises an amino acid sequence encoded by a polynucleotide having at least 80%, at least 85%, at least 90%, at least 91%, at least 92%, at least 93%, at least 94%, at least 95%, at least 96%, at least 97%, at least 98%, at least 99% or 100% identity to SEQ ID NO:687 or 688. In some aspects, an antigen binding polypeptide or antigen binding polypeptide complex provided herein comprises an amino acid sequence encoded by a polynucleotide having at least 80%, at least 85%, at least 90%, at least 91%, at least 92%, at least 93%, at least 94%, at least 95%, at least 96%, at least 97%, at least 98%, at least 99% or 100% identity to SEQ ID NO:689 or 690. In some aspects, an antigen binding polypeptide complex provided herein comprises a first polypeptide encoded by a polynucleotide having at least 80%, at least 85%, at least 90%, at least 91%, at least 92%, at least 93%, at least 94%, at least 95%, at least 96%, at least 97%, at least 98%, at least 99% or 100% identity to SEQ ID NO:687 or 688, and a second polypeptide encoded by a polynucleotide having at least 80%, at least 85%, at least 90%, at least 91%, at least 92%, at least 93%, at least 94%, at least 95%, at least 96%, at least 97%, at least 98%, at least 99% or 100% identity to SEQ ID NO:689 or 690. In some aspects, an antigen binding polypeptide complex provided herein comprises a first polypeptide encoded by the polynucleotide of SEQ ID NO:687 or 688, and a second polypeptide encoded by the polynucleotide of SEQ ID NO:689 or 690. In some preferred aspects, the first polypeptide and the second polypeptide are each encoded by a polynucleotide having at least 90% identity with a corresponding nucleic acid acid sequence specified above. As used herein, “at least 90% identity” includes at least 91%, 92%, 93%, 94%, 95%, 96%, 97%, 98%, 99% and 100% identity to the recited reference sequence. In some particularly preferred aspects, the first polypeptide and the second polypeptide are each encoded by a polynucleotide comprising or consisting of a corresponding nucleic acid sequence specified above.

[0618] In some aspects, an antigen binding polypeptide or antigen binding polypeptide complex provided herein comprises an amino acid sequence encoded by a polynucleotide having at least 80%, at least 85%, at least 90%, at least 91%, at least 92%, at least 93%, at least 94%, at least 95%, at least 96%, at least 97%, at least 98%, at least 99% or 100% identity to SEQ ID NO:691 or 692. In some aspects, an antigen binding polypeptide or antigen binding polypeptide complex provided herein comprises an amino acid sequence encoded by a polynucleotide having at least 80%, at least 85%, at least 90%, at least 91%, at least 92%, at least 93%, at least 94%, at least 95%, at least 96%, at least 97%, at least 98%, at least 99% or 100% identity to SEQ ID NO:693 or 694. In some aspects, an antigen binding polypeptide complex provided herein comprises a first polypeptide encoded by a polynucleotide having at least 80%, at least 85%, at least 90%, at least 91%, at least 92%, at least 93%, at least 94%, at least 95%, at least 96%, at least 97%, at least 98%, at least 99% or 100% identity to SEQ ID NO:691 or 692, and a second polypeptide encoded by a polynucleotide having at least 80%, at least 85%, at least 90%, at least 91%, at least 92%, at least 93%, at least 94%, at least 95%, at least 96%, at least 97%, at least 98%, at least 99% or 100% identity to SEQ ID NO:693 or 694. In some aspects, an antigen binding polypeptide complex provided herein comprises a first polypeptide encoded by the polynucleotide of SEQ ID NO:691 or 692, and a second polypeptide encoded by the polynucleotide of SEQ ID NO:693 or 694. In some preferred aspects, the first polypeptide and the second polypeptide are each encoded by a polynucleotide having at least 90% identity with a corresponding nucleic acid acid sequence specified above. As used herein, “at least 90% identity” includes at least 91%, 92%, 93%, 94%, 95%, 96%, 97%, 98%, 99% and 100% identity to the recited reference sequence. In some particularly preferred aspects, the first polypeptide and the second polypeptide are each encoded by a polynucleotide comprising or consisting of a corresponding nucleic acid sequence specified above.

[0619] In some aspects, an antigen binding polypeptide or antigen binding polypeptide complex provided herein comprises an amino acid sequence encoded by a polynucleotide having at least 80%, at least 85%, at least 90%, at least 91%, at least 92%, at least 93%, at least 94%, at least 95%, at least 96%, at least 97%, at least 98%, at least 99% or 100% identity to SEQ ID NO:695 or 696. In some aspects, an antigen binding polypeptide complex provided herein comprises a first polypeptide encoded by a polynucleotide having at least 80%, at least 85%, at least 90%, at least 91%, at least 92%, at least 93%, at least 94%, at least 95%, at least 96%, at least 97%, at least 98%, at least 99% or 100% identity to SEQ ID NO:695 or 696, and a second polypeptide encoded by a polynucleotide having at least 80%, at least 85%, at least 90%, at least 91%, at least 92%, at least 93%, at least 94%, at least 95%, at least 96%, at least 97%, at least 98%, at least 99% or 100% identity to SEQ ID NO:695 or 696. In some aspects, an antigen binding polypeptide complex provided herein comprises a first polypeptide encoded by the polynucleotide of SEQ ID NO:695 or 696, and a second polypeptide encoded by the polynucleotide of SEQ ID NO:695 or 696. In some preferred aspects, the first polypeptide and the second polypeptide are each encoded by a polynucleotide having at least 90% identity with a corresponding nucleic acid acid sequence specified above. As used herein, “at least 90% identity” includes at least 91%, 92%, 93%, 94%, 95%, 96%, 97%, 98%, 99% and 100% identity to the recited reference sequence. In some particularly preferred aspects, the first polypeptide and the second polypeptide are each encoded by a polynucleotide comprising or consisting of a corresponding nucleic acid sequence specified above.

[0620] In some aspects, an antigen binding polypeptide or antigen binding polypeptide complex provided herein comprises an amino acid sequence encoded by a polynucleotide having at least 80%, at least 85%, at least 90%, at least 91%, at least 92%, at least 93%, at least 94%, at least 95%, at least 96%, at least 97%, at least 98%, at least 99% or 100% identity to SEQ ID NO:697 or 698. In some aspects, an antigen binding polypeptide complex provided herein comprises a first polypeptide encoded by a polynucleotide having at least 80%, at least 85%, at least 90%, at least 91%, at least 92%, at least 93%, at least 94%, at least 95%, at least 96%, at least 97%, at least 98%, at least 99% or 100% identity to SEQ ID NO:697 or 698, and a second polypeptide encoded by a polynucleotide having at least 80%, at least 85%, at least 90%, at least 91%, at least 92%, at least 93%, at least 94%, at least 95%, at least 96%, at least 97%, at least 98%, at least 99% or 100% identity to SEQ ID NO:697 or 698. In some aspects, an antigen binding polypeptide complex provided herein comprises a first polypeptide encoded by the polynucleotide of SEQ ID NO:697 or 698, and a second polypeptide encoded by the polynucleotide of SEQ ID NO:697 or 698. In some preferred aspects, the first polypeptide and the second polypeptide are each encoded by a polynucleotide having at least 90% identity with a corresponding nucleic acid acid sequence specified above. As used herein, “at least 90% identity” includes at least 91%, 92%, 93%, 94%, 95%, 96%, 97%, 98%, 99% and 100% identity to the recited reference sequence. In some particularly preferred aspects, the first polypeptide and the second polypeptide are each encoded by a polynucleotide comprising or consisting of a corresponding nucleic acid sequence specified above.

[0621] In some aspects, an antigen binding polypeptide or antigen binding polypeptide complex provided herein comprises an amino acid sequence encoded by a polynucleotide having at least 80%, at least 85%, at least 90%, at least 91%, at least 92%, at least 93%, at least 94%, at least 95%, at least 96%, at least 97%, at least 98%, at least 99% or 100% identity to SEQ ID NO:699 or 700. In some aspects, an antigen binding polypeptide complex provided herein comprises a first polypeptide encoded by a polynucleotide having at least 80%, at least 85%, at least 90%, at least 91%, at least 92%, at least 93%, at least 94%, at least 95%, at least 96%, at least 97%, at least 98%, at least 99% or 100% identity to SEQ ID NO:699 or 700, and a second polypeptide encoded by a polynucleotide having at least 80%, at least 85%, at least 90%, at least 91%, at least 92%, at least 93%, at least 94%, at least 95%, at least 96%, at least 97%, at least 98%, at least 99% or 100% identity to SEQ ID NO:699 or 700. In some aspects, an antigen binding polypeptide complex provided herein comprises a first polypeptide encoded by the polynucleotide of SEQ ID NO:699 or 700, and a second polypeptide encoded by the polynucleotide of SEQ ID NO:699 or 700. In some preferred aspects, the first polypeptide and the second polypeptide are each encoded by a polynucleotide having at least 90% identity with a corresponding nucleic acid acid sequence specified above. As used herein, “at least 90% identity” includes at least 91%, 92%, 93%, 94%, 95%, 96%, 97%, 98%, 99% and 100% identity to the recited reference sequence. In some particularly preferred aspects, the first polypeptide and the second polypeptide are each encoded by a polynucleotide comprising or consisting of a corresponding nucleic acid sequence specified above.

[0622] In some aspects, an antigen binding polypeptide or antigen binding polypeptide complex provided herein comprises an amino acid sequence encoded by a polynucleotide having at least 80%, at least 85%, at least 90%, at least 91%, at least 92%, at least 93%, at least 94%, at least 95%, at least 96%, at least 97%, at least 98%, at least 99% or 100% identity to SEQ ID NO:701 or 702. In some aspects, an antigen binding polypeptide complex provided herein comprises a first polypeptide encoded by a polynucleotide having at least 80%, at least 85%, at least 90%, at least 91%, at least 92%, at least 93%, at least 94%, at least 95%, at least 96%, at least 97%, at least 98%, at least 99% or 100% identity to SEQ ID NO:701 or 702, and a second polypeptide encoded by a polynucleotide having at least 80%, at least 85%, at least 90%, at least 91%, at least 92%, at least 93%, at least 94%, at least 95%, at least 96%, at least 97%, at least 98%, at least 99% or 100% identity to SEQ ID NO:701 or 702. In some aspects, an antigen binding polypeptide complex provided herein comprises a first polypeptide encoded by the polynucleotide of SEQ ID NO:701 or 702, and a second polypeptide encoded by the polynucleotide of SEQ ID NO:701 or 702. In some preferred aspects, the first polypeptide and the second polypeptide are each encoded by a polynucleotide having at least 90% identity with a corresponding nucleic acid acid sequence specified above. As used herein, “at least 90% identity” includes at least 91%, 92%, 93%, 94%, 95%, 96%, 97%, 98%, 99% and 100% identity to the recited reference sequence. In some particularly preferred aspects, the first polypeptide and the second polypeptide are each encoded by a polynucleotide comprising or consisting of a corresponding nucleic acid sequence specified above.

[0623] In some aspects, an antigen binding polypeptide or antigen binding polypeptide complex provided herein comprises an amino acid sequence encoded by a polynucleotide having at least 80%, at least 85%, at least 90%, at least 91%, at least 92%, at least 93%, at least 94%, at least 95%, at least 96%, at least 97%, at least 98%, at least 99% or 100% identity to SEQ ID NO:703 or 704. In some aspects, an antigen binding polypeptide complex provided herein comprises a first polypeptide encoded by a polynucleotide having at least 80%, at least 85%, at least 90%, at least 91%, at least 92%, at least 93%, at least 94%, at least 95%, at least 96%, at least 97%, at least 98%, at least 99% or 100% identity to SEQ ID NO:703 or 704, and a second polypeptide encoded by a polynucleotide having at least 80%, at least 85%, at least 90%, at least 91%, at least 92%, at least 93%, at least 94%, at least 95%, at least 96%, at least 97%, at least 98%, at least 99% or 100% identity to SEQ ID NO:703 or 704. In some aspects, an antigen binding polypeptide complex provided herein comprises a first polypeptide encoded by the polynucleotide of SEQ ID NO:703 or 704, and a second polypeptide encoded by the polynucleotide of SEQ ID NO:703 or 704. In some preferred aspects, the first polypeptide and the second polypeptide are each encoded by a polynucleotide having at least 90% identity with a corresponding nucleic acid acid sequence specified above. As used herein, “at least 90% identity” includes at least 91%, 92%, 93%, 94%, 95%, 96%, 97%, 98%, 99% and 100% identity to the recited reference sequence. In some particularly preferred aspects, the first polypeptide and the second polypeptide are each encoded by a polynucleotide comprising or consisting of a corresponding nucleic acid sequence specified above.

[0624] In some aspects, an antigen binding polypeptide or antigen binding polypeptide complex provided herein comprises an amino acid sequence encoded by a polynucleotide having at least 80%, at least 85%, at least 90%, at least 91%, at least 92%, at least 93%, at least 94%, at least 95%, at least 96%, at least 97%, at least 98%, at least 99% or 100% identity to SEQ ID NO:705 or 706. In some aspects, an antigen binding polypeptide complex provided herein comprises a first polypeptide encoded by a polynucleotide having at least 80%, at least 85%, at least 90%, at least 91%, at least 92%, at least 93%, at least 94%, at least 95%, at least 96%, at least 97%, at least 98%, at least 99% or 100% identity to SEQ ID NO:705 or 706, and a second polypeptide encoded by a polynucleotide having at least 80%, at least 85%, at least 90%, at least 91%, at least 92%, at least 93%, at least 94%, at least 95%, at least 96%, at least 97%, at least 98%, at least 99% or 100% identity to SEQ ID NO:705 or 706. In some aspects, an antigen binding polypeptide complex provided herein comprises a first polypeptide encoded by the polynucleotide of SEQ ID NO:705 or 706, and a second polypeptide encoded by the polynucleotide of SEQ ID NO:705 or 706. In some preferred aspects, the first polypeptide and the second polypeptide are each encoded by a polynucleotide having at least 90% identity with a corresponding nucleic acid acid sequence specified above. As used herein, “at least 90% identity” includes at least 91%, 92%, 93%, 94%, 95%, 96%, 97%, 98%, 99% and 100% identity to the recited reference sequence. In some particularly preferred aspects, the first polypeptide and the second polypeptide are each encoded by a polynucleotide comprising or consisting of a corresponding nucleic acid sequence specified above.

[0625] In some aspects, an antigen binding polypeptide or antigen binding polypeptide complex provided herein comprises an amino acid sequence encoded by a polynucleotide having at least 80%, at least 85%, at least 90%, at least 91%, at least 92%, at least 93%, at least 94%, at least 95%, at least 96%, at least 97%, at least 98%, at least 99% or 100% identity to SEQ ID NO:707 or 708. In some aspects, an antigen binding polypeptide complex provided herein comprises a first polypeptide encoded by a polynucleotide having at least 80%, at least 85%, at least 90%, at least 91%, at least 92%, at least 93%, at least 94%, at least 95%, at least 96%, at least 97%, at least 98%, at least 99% or 100% identity to SEQ ID NO:707 or 704, and a second polypeptide encoded by a polynucleotide having at least 80%, at least 85%, at least 90%, at least 91%, at least 92%, at least 93%, at least 94%, at least 95%, at least 96%, at least 97%, at least 98%, at least 99% or 100% identity to SEQ ID NO:707 or 708. In some aspects, an antigen binding polypeptide complex provided herein comprises a first polypeptide encoded by the polynucleotide of SEQ ID NO:707 or 708, and a second polypeptide encoded by the polynucleotide of SEQ ID NO:707 or 708. In some preferred aspects, the first polypeptide and the second polypeptide are each encoded by a polynucleotide having at least 90% identity with a corresponding nucleic acid acid sequence specified above. As used herein, “at least 90% identity” includes at least 91%, 92%, 93%, 94%, 95%, 96%, 97%, 98%, 99% and 100% identity to the recited reference sequence. In some particularly preferred aspects, the first polypeptide and the second polypeptide are each encoded by a polynucleotide comprising or consisting of a corresponding nucleic acid sequence specified above.

[0626] In some aspects, an antigen binding polypeptide or antigen binding polypeptide complex provided herein comprises an amino acid sequence encoded by a polynucleotide having at least 80%, at least 85%, at least 90%, at least 91%, at least 92%, at least 93%, at least 94%, at least 95%, at least 96%, at least 97%, at least 98%, at least 99% or 100% identity to SEQ ID NO:709 or 710. In some aspects, an antigen binding polypeptide complex provided herein comprises a first polypeptide encoded by a polynucleotide having at least 80%, at least 85%, at least 90%, at least 91%, at least 92%, at least 93%, at least 94%, at least 95%, at least 96%, at least 97%, at least 98%, at least 99% or 100% identity to SEQ ID NO:709 or 710, and a second polypeptide encoded by a polynucleotide having at least 80%, at least 85%, at least 90%, at least 91%, at least 92%, at least 93%, at least 94%, at least 95%, at least 96%, at least 97%, at least 98%, at least 99% or 100% identity to SEQ ID NO:709 or 710. In some aspects, an antigen binding polypeptide complex provided herein comprises a first polypeptide encoded by the polynucleotide of SEQ ID NO:709 or 710, and a second polypeptide encoded by the polynucleotide of SEQ ID NO:709 or 710. In some preferred aspects, the first polypeptide and the second polypeptide are each encoded by a polynucleotide having at least 90% identity with a corresponding nucleic acid acid sequence specified above. As used herein, “at least 90% identity” includes at least 91%, 92%, 93%, 94%, 95%, 96%, 97%, 98%, 99% and 100% identity to the recited reference sequence. In some particularly preferred aspects, the first polypeptide and the second polypeptide are each encoded by a polynucleotide comprising or consisting of a corresponding nucleic acid sequence specified above.

[0627] In some aspects, an antigen binding polypeptide or antigen binding polypeptide complex provided herein comprises an amino acid sequence having at least 80%, at least 85%, at least 90%, at least 91%, at least 92%, at least 93%, at least 94%, at least 95%, at least 96%, at least 97%, at least 98%, at least 99% or 100% identity to SEQ ID NO:256. In some aspects, an antigen binding polypeptide complex provided herein comprises a first polypeptide having at least 80%, at least 85%, at least 90%, at least 91%, at least 92%, at least 93%, at least 94%, at least 95%, at least 96%, at least 97%, at least 98%, at least 99% or 100% identity to SEQ ID NO:256, and a second polypeptide having at least 80%, at least 85%, at least 90%, at least 91%, at least 92%, at least 93%, at least 94%, at least 95%, at least 96%, at least 97%, at least 98%, at least 99% or 100% identity to SEQ ID NO:256. In some preferred aspects, the first polypeptide and the second polypeptide have at least 90% identity with the corresponding amino acid sequences specified above. As used herein, “at least 90% identity” includes at least 91%, 92%, 93%, 94%, 95%, 96%, 97%, 98%, 99% and 100% identity to the recited reference sequence. In some particularly preferred aspects, the first polypeptide and the second polypeptide comprise or consist of the corresponding amino acid sequences specified above.

[0628] In some aspects, an antigen binding polypeptide or antigen binding polypeptide complex provided herein comprises an amino acid sequence having at least 80%, at least 85%, at least 90%, at least 91%, at least 92%, at least 93%, at least 94%, at least 95%, at least 96%, at least 97%, at least 98%, at least 99% or 100% identity to SEQ ID NO:257. In some aspects, an antigen binding polypeptide or antigen binding polypeptide complex provided herein comprises an amino acid sequence having at least 80%, at least 85%, at least 90%, at least 91%, at least 92%, at least 93%, at least 94%, at least 95%, at least 96%, at least 97%, at least 98%, at least 99% or 100% identity to SEQ ID NO:258. In some aspects, an antigen binding polypeptide complex provided herein comprises a first polypeptide having at least 80%, at least 85%, at least 90%, at least 91%, at least 92%, at least 93%, at least 94%, at least 95%, at least 96%, at least 97%, at least 98%, at least 99% or 100% identity to SEQ ID NO:257, and a second polypeptide having at least 80%, at least 85%, at least 90%, at least 91%, at least 92%, at least 93%, at least 94%, at least 95%, at least 96%, at least 97%, at least 98%, at least 99% or 100% identity to SEQ ID NO:258. In some preferred aspects, the first polypeptide and the second polypeptide have at least 90% identity with the corresponding amino acid sequences specified above. As used herein, “at least 90% identity” includes at least 91%, 92%, 93%, 94%, 95%, 96%, 97%, 98%, 99% and 100% identity to the recited reference sequence. In some particularly preferred aspects, the first polypeptide and the second polypeptide comprise or consist of the corresponding amino acid sequences specified above.

[0629] In some aspects, provided herein is an antigen binding polypeptide complex comprising a first polypeptide and a second polypeptide; wherein the first polypeptide has a structure represented by VL1-L1-VH1 or VH1-L2-VL1; wherein the second polypeptide has a structure represented by VL2-L3-VH2 or VH2-L4-VL2; wherein VL1 is a first immunoglobulin light chain variable region that specifically binds to a SARS-CoV-2 protein; VH1 is a first immunoglobulin heavy chain variable region that specifically binds to a SARS-CoV-2 protein; wherein VL2 is a second immunoglobulin light chain variable region that specifically binds to a SARS-CoV-2 protein; wherein VH2 is a second immunoglobulin heavy chain variable region that specifically binds to a SARS-CoV-2 protein; and L1-L4 are amino acid linkers. In some aspects, provided herein is an antigen binding polypeptide complex comprising a first polypeptide and a second polypeptide; wherein the first polypeptide has a structure represented by VL1-L1-VH1-L2-Fc or VH1-L3-VL1-L4-Fc; wherein the second polypeptide has a structure represented by VL2-L5-VH2-L6-Fc or VH2-L7-VL2-L8-Fc; wherein VL1 is a first immunoglobulin light chain variable region that specifically binds to a SARS-CoV-2 protein; VH1 is a first immunoglobulin heavy chain variable region that specifically binds to a SARS-CoV-2 protein; wherein VL2 is a second immunoglobulin light chain variable region that specifically binds to a SARS-CoV-2 protein; wherein VH2 is a second immunoglobulin heavy chain variable region that specifically binds to a SARS-CoV-2 protein; L1-L8 are amino acid linkers; and Fc is a region comprising an immunoglobulin heavy chain constant region 2 (CH2), an immunoglobulin heavy chain constant region 3 (CH3), and optionally, an immunoglobulin hinge. For example, the first polypeptide has a structure represented by VL1-L1-VH1 and the second polypeptide has a structure represented by VL2-L3-VH2 or VH2-L4-VL2. For example, the first polypeptide has a structure represented by VH1-L2-VL1 and the second polypeptide has a structure represented by VL2-L3-VH2 or VH2-L4-VL2.

[0630] In some aspects, VH1 and VH2 comprise a CDR1 comprising an amino acid sequence having at least 80%, at least 85%, at least 90%, at least 91%, at least 92%, at least 93%, at least 94%, at least 95%, at least 96%, at least 97%, at least 98%, at least 99% or 100% identity to SEQ ID NO:264; a CDR2 comprising an amino acid sequence having at least 80%, at least 85%, at least 90%, at least 91%, at least 92%, at least 93%, at least 94%, at least 95%, at least 96%, at least 97%, at least 98%, at least 99% or 100% identity to SEQ ID NO:265; and a CDR3 comprising an amino acid sequence having at least 80%, at least 85%, at least 90%, at least 91%, at least 92%, at least 93%, at least 94%, at least 95%, at least 96%, at least 97%, at least 98%, at least 99% or 100% identity to SEQ ID NO:266; and VL1 and VL2 comprise a CDR1 comprising an amino acid sequence having at least 80%, at least 85%, at least 90%, at least 91%, at least 92%, at least 93%, at least 94%, at least 95%, at least 96%, at least 97%, at least 98%, at least 99% or 100% identity to SEQ ID NO:260; a CDR2 comprising an amino acid sequence having at least 80%, at least 85%, at least 90%, at least 91%, at least 92%, at least 93%, at least 94%, at least 95%, at least 96%, at least 97%, at least 98%, at least 99% or 100% identity to SEQ ID NO:261; and a CDR3 comprising an amino acid sequence having at least 80%, at least 85%, at least 90%, at least 91%, at least 92%, at least 93%, at least 94%, at least 95%, at least 96%, at least 97%, at least 98%, at least 99% or 100% identity to SEQ ID NO:262. In some aspects, VH1 and VH2 comprise a CDR1 comprising the amino acid sequence of SEQ ID NO:264; a CDR2 comprising the amino acid sequence of SEQ ID NO:265; and a CDR3 comprising the amino acid sequence of SEQ ID NO:266; and VL1 and VL2 comprise a CDR1 comprising the amino acid sequence of SEQ ID NO:260; a CDR2 comprising the amino acid sequence of SEQ ID NO:261; and a CDR3 comprising the amino acid sequence of SEQ ID NO:262. In some aspects, L1 or L2 and L3 or L4 comprise the amino acid sequence of any one of SEQ ID NOs:1-34, wherein SEQ ID NO:1 has the amino acid sequence of G, SEQ ID NO:2 has the amino acid sequence of A, SEQ ID NO:3 has the amino acid sequence of GSS and SEQ ID NO:4 has the amino acid sequence of ASG. In some aspects, L1 or L2 and L3 or L4 comprise the amino acid sequence of SEQ ID NO:27. In some aspects, L1 or L3 and L5 or L7 comprise the amino acid sequence of any one of SEQ ID NOs:1-34, wherein SEQ ID NO:1 has the amino acid sequence of G, SEQ ID NO:2 has the amino acid sequence of A, SEQ ID NO:3 has the amino acid sequence of GSS and SEQ ID NO:4 has the amino acid sequence of ASG. In some aspects, L1 or L3 and L5 or L7 comprise the amino acid sequence of SEQ ID NO:27. In some aspects, L2 or L4 and L6 or L8 comprise the amino acid sequence of any one of SEQ ID NOs:1-34, wherein SEQ ID NO:1 has the amino acid sequence of G, SEQ ID NO:2 has the amino acid sequence of A, SEQ ID NO:3 has the amino acid sequence of GSS and SEQ ID NO:4 has the amino acid sequence of ASG. In some aspects, L2 or L4 and L6 or L8 comprise the amino acid sequence of SEQ ID NO:12. In some aspects, Fc comprises a knob-into-hole modification or Fc effector function knockout mutation. In some aspects, Fc comprises an amino acid sequence having at least 80%, at least 85%, at least 90%, at least 91%, at least 92%, at least 93%, at least 94%, at least 95%, at least 96%, at least 97%, at least 98%, at least 99%, or 100% identity to SEQ ID NO:37. In some aspects, Fc comprises the amino acid sequence of SEQ ID NO:37. In some preferred aspects, CDR1, CDR2 and CDR3 of each of VH1, VH2, VL1 and VL2 have at least 90% identity with the corresponding amino acid sequences specified above, optionally with (i) an Fc having at least 90% identity with the corresponding amino acid sequence recited above; and/or (ii) one or more linker sequence as specified above. In some particularly preferred aspects, CDR1, CDR2 and CDR3 of each of VH1, VH2, VL1 and VL2 comprise or consist of the corresponding amino acid sequences specified above, optionally with (i) an Fc comprising or consisting of the corresponding amino acid sequence recited above; and/or (ii) one or more linker sequence as specified above.

[0631] In some aspects, VH1 and VH2 comprise a CDR1 comprising an amino acid sequence having at least 80%, at least 85%, at least 90%, at least 91%, at least 92%, at least 93%, at least 94%, at least 95%, at least 96%, at least 97%, at least 98%, at least 99% or 100% identity to SEQ ID NO:272; a CDR2 comprising an amino acid sequence having at least 80%, at least 85%, at least 90%, at least 91%, at least 92%, at least 93%, at least 94%, at least 95%, at least 96%, at least 97%, at least 98%, at least 99% or 100% identity to SEQ ID NO:273; and a CDR3 comprising an amino acid sequence having at least 80%, at least 85%, at least 90%, at least 91%, at least 92%, at least 93%, at least 94%, at least 95%, at least 96%, at least 97%, at least 98%, at least 99% or 100% identity to SEQ ID NO:274; and VL1 and VL2 comprise a CDR1 comprising an amino acid sequence having at least 80%, at least 85%, at least 90%, at least 91%, at least 92%, at least 93%, at least 94%, at least 95%, at least 96%, at least 97%, at least 98%, at least 99% or 100% identity to SEQ ID NO:268; a CDR2 comprising an amino acid sequence having at least 80%, at least 85%, at least 90%, at least 91%, at least 92%, at least 93%, at least 94%, at least 95%, at least 96%, at least 97%, at least 98%, at least 99% or 100% identity to SEQ ID NO:269 (having the sequence of GAS); and a CDR3 comprising an amino acid sequence having at least 80%, at least 85%, at least 90%, at least 91%, at least 92%, at least 93%, at least 94%, at least 95%, at least 96%, at least 97%, at least 98%, at least 99% or 100% identity to SEQ ID NO:270. In some aspects, VH1 and VH2 comprise a CDR1 comprising the amino acid sequence of SEQ ID NO:272; a CDR2 comprising the amino acid sequence of SEQ ID NO:273; and a CDR3 comprising the amino acid sequence of SEQ ID NO:274; and VL1 and VL2 comprise a CDR1 comprising the amino acid sequence of SEQ ID NO:268; a CDR2 comprising the amino acid sequence of SEQ ID NO:269 (having the sequence of GAS); and a CDR3 comprising the amino acid sequence of SEQ ID NO:270. In some aspects, L1 or L2 and L3 or L4 comprise the amino acid sequence of any one of SEQ ID NOs:1-34, wherein SEQ ID NO:1 has the amino acid sequence of G, SEQ ID NO:2 has the amino acid sequence of A, SEQ ID NO:3 has the amino acid sequence of GSS and SEQ ID NO:4 has the amino acid sequence of ASG. In some aspects, L1 or L2 and L3 or L4 comprise the amino acid sequence of SEQ ID NO:27. In some aspects, L1 or L3 and L5 or L7 comprise the amino acid sequence of any one of SEQ ID NOs:1-34, wherein SEQ ID NO:1 has the amino acid sequence of G, SEQ ID NO:2 has the amino acid sequence of A, SEQ ID NO:3 has the amino acid sequence of GSS and SEQ ID NO:4 has the amino acid sequence of ASG. In some aspects, L1 or L3 and L5 or L7 comprise the amino acid sequence of SEQ ID NO:27. In some aspects, L2 or L4 and L6 or L8 comprise the amino acid sequence of any one of SEQ ID NOs:1-34, wherein SEQ ID NO:1 has the amino acid sequence of G, SEQ ID NO:2 has the amino acid sequence of A, SEQ ID NO:3 has the amino acid sequence of GSS and SEQ ID NO:4 has the amino acid sequence of ASG. In some aspects, L2 or L4 and L6 or L8 comprise the amino acid sequenee of SEQ ID NO:12. In some aspects, Fc comprises a knob-into-hole modification or Fc effector function knockout mutation. In some aspects, Fc comprises an amino acid sequence having at least 80%, at least 85%, at least 90%, at least 91%, at least 92%, at least 93%, at least 94%, at least 95%, at least 96%, at least 97%, at least 98%, at least 99%, or 100% identity to SEQ ID NO:37. In some aspects, Fc comprises the amino acid sequence of SEQ ID NO:37. In some preferred aspects, CDR1, CDR2 and CDR3 of each of VH1, VH2, VL1 and VL2 have at least 90% identity with the corresponding amino acid sequences specified above, optionally with (i) an Fc having at least 90% identity with the corresponding amino acid sequence recited above; and/or (ii) one or more linker sequence as specified above. In some particularly preferred aspects, CDR1, CDR2 and CDR3 of each of VH1, VH2, VL1 and VL2 comprise or consist of the corresponding amino acid sequences specified above, optionally with (i) an Fc comprising or consisting of the corresponding amino acid sequence recited above; and/or (ii) one or more linker sequence as specified above.

[0632] In some aspects, VH1 and VH2 comprise a CDR1 comprising an amino acid sequence having at least 80%, at least 85%, at least 90%, at least 91%, at least 92%, at least 93%, at least 94%, at least 95%, at least 96%, at least 97%, at least 98%, at least 99% or 100% identity to SEQ ID NO:280; a CDR2 comprising an amino acid sequence having at least 80%, at least 85%, at least 90%, at least 91%, at least 92%, at least 93%, at least 94%, at least 95%, at least 96%, at least 97%, at least 98%, at least 99% or 100% identity to SEQ ID NO:281; and a CDR3 comprising an amino acid sequence having at least 80%, at least 85%, at least 90%, at least 91%, at least 92%, at least 93%, at least 94%, at least 95%, at least 96%, at least 97%, at least 98%, at least 99% or 100% identity to SEQ ID NO:282; and VL1 and VL2 comprise a CDR1 comprising an amino acid sequence having at least 80%, at least 85%, at least 90%, at least 91%, at least 92%, at least 93%, at least 94%, at least 95%, at least 96%, at least 97%, at least 98%, at least 99% or 100% identity to SEQ ID NO:276; a CDR2 comprising an amino acid sequence having at least 80%, at least 85%, at least 90%, at least 91%, at least 92%, at least 93%, at least 94%, at least 95%, at least 96%, at least 97%, at least 98%, at least 99% or 100% identity to SEQ ID NO:277 (having the sequence of LGS); and a CDR3 comprising an amino acid sequence having at least 80%, at least 85%, at least 90%, at least 91%, at least 92%, at least 93%, at least 94%, at least 95%, at least 96%, at least 97%, at least 98%, at least 99% or 100% identity to SEQ ID NO:278. In some aspects, VH1 and VH2 comprise a CDR1 comprising the amino acid sequence of SEQ ID NO:280; a CDR2 comprising the amino acid sequence of SEQ ID NO:281; and a CDR3 comprising the amino acid sequence of SEQ ID NO:282; and VL1 and VL2 comprise a CDR1 comprising the amino acid sequence of SEQ ID NO:276; a CDR2 comprising the amino acid sequence of SEQ ID NO:277 (having the sequence of LGS); and a CDR3 comprising the amino acid sequence of SEQ ID NO:278. In some aspects, L1 or L2 and L3 or L4 comprise the amino acid sequence of any one of SEQ ID NOs:1-34, wherein SEQ ID NO:1 has the amino acid sequence of G, SEQ ID NO:2 has the amino acid sequence of A, SEQ ID NO:3 has the amino acid sequence of GSS and SEQ ID NO:4 has the amino acid sequence of ASG. In some aspects, L1 or L2 and L3 or L4 comprise the amino acid sequence of SEQ ID NO:27. In some aspects, L1 or L3 and L5 or L7 comprise the amino acid sequence of any one of SEQ ID NOs:1-34, wherein SEQ ID NO:1 has the amino acid sequence of G, SEQ ID NO:2 has the amino acid sequence of A, SEQ ID NO:3 has the amino acid sequence of GSS and SEQ ID NO:4 has the amino acid sequence of ASG. In some aspects, L1 or L3 and L5 or L7 comprise the amino acid sequence of SEQ ID NO:27. In some aspects, L2 or L4 and L6 or L8 comprise the amino acid sequence of any one of SEQ ID NOs:1-34, wherein SEQ ID NO:1 has the amino acid sequence of G, SEQ ID NO:2 has the amino acid sequence of A, SEQ ID NO:3 has the amino acid sequence of GSS and SEQ ID NO:4 has the amino acid sequence of ASG. In some aspects, L2 or L4 and L6 or L8 comprise the amino acid sequenee of SEQ ID NO:12. In some aspects, Fc comprises a knob-into-hole modification or Fc effector function knockout mutation. In some aspects, Fc comprises an amino acid sequence having at least 80%, at least 85%, at least 90%, at least 91%, at least 92%, at least 93%, at least 94%, at least 95%, at least 96%, at least 97%, at least 98%, at least 99%, or 100% identity to SEQ ID NO:37. In some aspects, Fc comprises the amino acid sequence of SEQ ID NO:37. In some preferred aspects, CDR1, CDR2 and CDR3 of each of VH1, VH2, VL1 and VL2 have at least 90% identity with the corresponding amino acid sequences specified above, optionally with (i) an Fc having at least 90% identity with the corresponding amino acid sequence recited above; and/or (ii) one or more linker sequence as specified above. In some particularly preferred aspects, CDR1, CDR2 and CDR3 of each of VH1, VH2, VL1 and VL2 comprise or consist of the corresponding amino acid sequences specified above, optionally with (i) an Fc comprising or consisting of the corresponding amino acid sequence recited above; and/or (ii) one or more linker sequence as specified above.

[0633] In some aspects, provided herein is an antigen binding polypeptide complex comprising a first polypeptide and a second polypeptide; wherein the first polypeptide has a structure represented by VL1-L1-VL2-L2-VH2-L3-VH1; VL1-L1-VH2-L2-VL2-L3-VH1; VH1-L4-VH2-L5-VL2-L6-VL1; or VH1-L4-VL2-L5-VH2-L6-VL1; wherein the second polypeptide has a structure represented by VL3-L7-VL4-L8-VH4-L9-VH3; VL3-L7-VH4-L8-VL4-L9-VH3; VH3-L10-VH4-L11-VL4-L12-VL3; or VH3-L10-VL4-L11-VH4-L12-VL3; wherein VL1 is a first immunoglobulin light chain variable region that specifically binds to a SARS-CoV-2 protein; VL2 is a second immunoglobulin light chain variable region that specifically binds to a SARS-CoV-2 protein; VL3 is a third immunoglobulin light chain variable region that specifically binds to a SARS-CoV-2 protein; VL4 is a fourth immunoglobulin light chain variable region that specifically binds to a SARS-CoV-2 protein; VH1 is a first immunoglobulin heavy chain variable region that specifically binds to a SARS-CoV-2 protein; VH2 is a second immunoglobulin heavy chain variable region that specifically binds to a SARS-CoV-2 protein; VH3 is a third immunoglobulin heavy chain variable region that specifically binds to a SARS-CoV-2 protein; VH4 is a fourth immunoglobulin heavy chain variable region that specifically binds to a SARS-CoV-2 protein; and L1-L12 are amino acid linkers. In some aspects, provided herein is an antigen binding polypeptide complex comprising a first polypeptide and a second polypeptide; wherein the first polypeptide has a structure represented by VL1-L1-VL2-L2-VH2-L3-VH1-L4-Fc; VL1-L1-VH2-L2-VL2-L3-VH1-L4-Fc; VH1-L5-VH2-L6-VL2-L7-VL1-L8-Fc; or VH1-L5-VL2-L6-VH2-L7-VL1-L8-Fc; wherein the second polypeptide has a structure represented by Fc; VL3-L9-VL4-L10-VH4-L11-VH3-L12-Fc; VL3-L9-VH4-L10-VL4-L11-VH3-L12-Fc; VH3-L13-VH4-L14-VL4-L15-VL3-L16-Fc; or VH3-L13-VL4-L14-VH4-L15-VL3-L16-Fc; wherein VL1 is a first immunoglobulin light chain variable region that specifically binds to a SARS-CoV-2 spike protein; VL2 is a second immunoglobulin light chain variable region that specifically binds to a SARS-CoV-2 spike protein; VL3 is a third immunoglobulin light chain variable region that specifically binds to a SARS-CoV-2 spike protein; VL4 is a fourth immunoglobulin light chain variable region that specifically binds to a SARS-CoV-2 spike protein; VH1 is a first immunoglobulin heavy chain variable region that specifically binds to a SARS-CoV-2 spike protein; VH2 is a second immunoglobulin heavy chain variable region that specifically binds to a SARS-CoV-2 spike protein; VH3 is a third immunoglobulin heavy chain variable region that specifically binds to a SARS-CoV-2 spike protein; VH4 is a fourth immunoglobulin heavy chain variable region that specifically binds to a SARS-CoV-2 spike protein; Fc is a region comprising an immunoglobulin heavy chain constant region 2 (CH2), an immunoglobulin heavy chain constant region 3 (CH3), and optionally, an immunoglobulin hinge; and L1-L16 are amino acid linkers. In some aspects, provided herein is an antigen binding polypeptide complex comprising a first polypeptide and a second polypeptide; wherein the first polypeptide has a structure represented by VL1-L1-VL2-L2-VH2-L3-VH1; the second polypeptide has a structure represented by VL3-L7-VL4-L8-VH4-L9-VH3; VL3-L7-VH4-L8-VL4-L9-VH3; VH3-L10-VH4-L11-VL4-L12-VL3; or VH3-L10-VL4-L11-VH4-L12-VL3. In some aspects, provided herein is an antigen binding polypeptide complex comprising a first polypeptide and a second polypeptide; wherein the first polypeptide has a structure represented by VL1-L1-VH2-L2-VL2-L3-VH1; the second polypeptide has a structure represented by VL3-L7-VL4-L8-VH4-L9-VH3; VL3-L7-VH4-L8-VL4-L9-VH3; VH3-L10-VH4-L11-VL4-L12-VL3; or VH3-L10-VL4-L11-VH4-L12-VL3. In some aspects, provided herein is an antigen binding polypeptide complex comprising a first polypeptide and a second polypeptide; wherein the first polypeptide has a structure represented by VH1-L4-VH2-L5-VL2-L6-VL1; the second polypeptide has a structure represented by VL3-L7-VL4-L8-VH4-L9-VH3; VL3-L7-VH4-L8-VL4-L9-VH3; VH3-L10-VH4-L11-VL4-L12-VL3; or VH3-L10-VL4-L11-VH4-L12-VL3. In some aspects, provided herein is an antigen binding polypeptide complex comprising a first polypeptide and a second polypeptide; wherein the first polypeptide has a structure represented by VH1-L4-VL2-L5-VH2-L6-VL1; the second polypeptide has a structure represented by VL3-L7-VL4-L8-VH4-L9-VH3; VL3-L7-VH4-L8-VL4-L9-VH3; VH3-L10-VH4-L11-VL4-L12-VL3; or VH3-L10-VL4-L11-VH4-L12-VL3.

[0634] In some aspects, VH1, VH2, VH3 and VH4 each comprise a CDR1 comprising an amino acid sequence having at least 80%, at least 85%, at least 90%, at least 91%, at least 92%, at least 93%, at least 94%, at least 95%, at least 96%, at least 97%, at least 98%, at least 99% or 100% identity to SEQ ID NO:264; a CDR2 comprising an amino acid sequence having at least 80%, at least 85%, at least 90%, at least 91%, at least 92%, at least 93%, at least 94%, at least 95%, at least 96%, at least 97%, at least 98%, at least 99% or 100% identity to SEQ ID NO:265; and a CDR3 comprising an amino acid sequence having at least 80%, at least 85%, at least 90%, at least 91%, at least 92%, at least 93%, at least 94%, at least 95%, at least 96%, at least 97%, at least 98%, at least 99% or 100% identity to SEQ ID NO:266; and VL1, VL2, VL3 and VL4 each comprise a CDR1 comprising an amino acid sequence having at least 80%, at least 85%, at least 90%, at least 91%, at least 92%, at least 93%, at least 94%, at least 95%, at least 96%, at least 97%, at least 98%, at least 99% or 100% identity to SEQ ID NO:260; a CDR2 comprising an amino acid sequence having at least 80%, at least 85%, at least 90%, at least 91%, at least 92%, at least 93%, at least 94%, at least 95%, at least 96%, at least 97%, at least 98%, at least 99% or 100% identity to SEQ ID NO:261; and a CDR3 comprising an amino acid sequence having at least 80%, at least 85%, at least 90%, at least 91%, at least 92%, at least 93%, at least 94%, at least 95%, at least 96%, at least 97%, at least 98%, at least 99% or 100% identity to SEQ ID NO:262. In some aspects, VH1, VH2, VH3 and VH4 each comprise a CDR1 comprising the amino acid sequence of SEQ ID NO:264; a CDR2 comprising the amino acid sequence of SEQ ID NO:265; and a CDR3 comprising the amino acid sequence of SEQ ID NO:266; and VL1, VL2, VL3 and VL4 each comprise a CDR1 comprising the amino acid sequence of SEQ ID NO:260; a CDR2 comprising the amino acid sequence of SEQ ID NO:261; and a CDR3 comprising the amino acid sequence of SEQ ID NO:262. In some aspects, L1 or L4 and L7 or L10 comprise the amino acid sequence of SEQ ID NO:6; L2 or L5 and L8 or L11 comprise the amino acid sequence of SEQ ID NO:27; and L3 or L6 and L9 or L12 comprise the amino acid sequence of SEQ ID NO:6. In some aspects, L1 or L5 and L9 or L13 comprise the amino acid sequence of SEQ ID NO:6; L2 or L6 and L10 or L14 comprise the amino acid sequence of SEQ ID NO:27; L3 or L7 and L11 or L15 comprise the amino acid sequence of SEQ ID NO:6; and L4 or L8 and L12 or L16 comprise the amino acid sequence of SEQ ID NO:12. In some aspects, Fc comprises a knob-into-hole modification or Fc effector function knockout mutation. In some aspects, Fc comprises an amino acid sequence having at least 80%, at least 85%, at least 90%, at least 91%, at least 92%, at least 93%, at least 94%, at least 95%, at least 96%, at least 97%, at least 98%, at least 99%, or 100% identity to SEQ ID NO:37. In some aspects, Fc comprises the amino acid sequence of SEQ ID NO:37. In some preferred aspects, CDR1, CDR2 and CDR3 of each of VH1, VH2, VH3, VH4, VL1, VL2, VL3 and VL4 have at least 90% identity with the corresponding amino acid sequences specified above, optionally with (i) an Fc having at least 90% identity with the corresponding amino acid sequence recited above; and/or (ii) one or more linker sequence as specified above. In some particularly preferred aspects, CDR1, CDR2 and CDR3 of each of VH1, VH2, VH3, VH4, VL1, VL2, VL3 and VL4 comprise or consist of the corresponding amino acid sequences specified above, optionally with (i) an Fc comprising or consisting of the corresponding amino acid sequence recited above; and/or (ii) one or more linker sequence as specified above.

[0635] In some aspects, VH1, VH2, VH3 and VH4 each comprise a CDR1 comprising an amino acid sequence having at least 80%, at least 85%, at least 90%, at least 91%, at least 92%, at least 93%, at least 94%, at least 95%, at least 96%, at least 97%, at least 98%, at least 99% or 100% identity to SEQ ID NO:272; a CDR2 comprising an amino acid sequence having at least 80%, at least 85%, at least 90%, at least 91%, at least 92%, at least 93%, at least 94%, at least 95%, at least 96%, at least 97%, at least 98%, at least 99% or 100% identity to SEQ ID NO:273; and a CDR3 comprising an amino acid sequence having at least 80%, at least 85%, at least 90%, at least 91%, at least 92%, at least 93%, at least 94%, at least 95%, at least 96%, at least 97%, at least 98%, at least 99% or 100% identity to SEQ ID NO:274; and VL1, VL2, VL3 and VL4 each comprise a CDR1 comprising an amino acid sequence having at least 80%, at least 85%, at least 90%, at least 91%, at least 92%, at least 93%, at least 94%, at least 95%, at least 96%, at least 97%, at least 98%, at least 99% or 100% identity to SEQ ID NO:268; a CDR2 comprising an amino acid sequence having at least 80%, at least 85%, at least 90%, at least 91%, at least 92%, at least 93%, at least 94%, at least 95%, at least 96%, at least 97%, at least 98%, at least 99% or 100% identity to SEQ ID NO:269 (having the sequence of GAS); and a CDR3 comprising an amino acid sequence having at least 80%, at least 85%, at least 90%, at least 91%, at least 92%, at least 93%, at least 94%, at least 95%, at least 96%, at least 97%, at least 98%, at least 99% or 100% identity to SEQ ID NO:270. In some aspects, VH1, VH2, VH3 and VH4 each comprise a CDR1 comprising the amino acid sequence of SEQ ID NO:272; a CDR2 comprising the amino acid sequence of SEQ ID NO:273; and a CDR3 comprising the amino acid sequence of SEQ ID NO:274; and VL1, VL2, VL3 and VL4 each comprise a CDR1 comprising the amino acid sequence of SEQ ID NO:268; a CDR2 comprising the amino acid sequence of SEQ ID NO:269 (having the sequence of GAS); and a CDR3 comprising the amino acid sequence of SEQ ID NO:270. In some aspects, L1-L16 comprise the amino acid sequence of any one of SEQ ID NOs:1-34, wherein SEQ ID NO:1 has the amino acid sequence of G, SEQ ID NO:2 has the amino acid sequence of A, SEQ ID NO:3 has the amino acid sequence of GSS and SEQ ID NO:4 has the amino acid sequence of ASG. In some aspects, L1 or L4 and L7 or L10 comprise the amino acid sequence of SEQ ID NO:6; L2 or L5 and L8 or L11 comprise the amino acid sequence of SEQ ID NO:27; and L3 or L6 and L9 or L12 comprise the amino acid sequence of SEQ ID NO:6. In some aspects, L1 or L5 and L9 or L13 comprise the amino acid sequence of SEQ ID NO:6; L2 or L6 and L10 or L14 comprise the amino acid sequence of SEQ ID NO:27; L3 or L7 and L11 or L15 comprise the amino acid sequence of SEQ ID NO:6; and L4 or L8 and L12 or L16 comprise the amino acid sequence of SEQ ID NO:12. In some aspects, Fc comprises a knob-into-hole modification or Fc effector function knockout mutation. In some aspects, Fc comprises an amino acid sequence having at least 80%, at least 85%, at least 90%, at least 91%, at least 92%, at least 93%, at least 94%, at least 95%, at least 96%, at least 97%, at least 98%, at least 99%, or 100% identity to SEQ ID NO:37. In some aspects, Fc comprises the amino acid sequence of SEQ ID NO:37. In some preferred aspects, CDR1, CDR2 and CDR3 of each of VH1, VH2, VH3, VH4, VL1, VL2, VL3 and VL4 have at least 90% identity with the corresponding amino acid sequences specified above, optionally with (i) an Fc having at least 90% identity with the corresponding amino acid sequence recited above; and/or (ii) one or more linker sequence as specified above. In some particularly preferred aspects, CDR1, CDR2 and CDR3 of each of VH1, VH2, VH3, VH4, VL1, VL2, VL3 and VL4 comprise or consist of the corresponding amino acid sequences specified above, optionally with (i) an Fc comprising or consisting of the corresponding amino acid sequence recited above; and/or (ii) one or more linker sequence as specified above.

[0636] In some aspects, VH1, VH2, VH3 and VH4 each comprise a CDR1 comprising an amino acid sequence having at least 80%, at least 85%, at least 90%, at least 91%, at least 92%, at least 93%, at least 94%, at least 95%, at least 96%, at least 97%, at least 98%, at least 99% or 100% identity to SEQ ID NO:280; a CDR2 comprising an amino acid sequence having at least 80%, at least 85%, at least 90%, at least 91%, at least 92%, at least 93%, at least 94%, at least 95%, at least 96%, at least 97%, at least 98%, at least 99% or 100% identity to SEQ ID NO:281; and a CDR3 comprising an amino acid sequence having at least 80%, at least 85%, at least 90%, at least 91%, at least 92%, at least 93%, at least 94%, at least 95%, at least 96%, at least 97%, at least 98%, at least 99% or 100% identity to SEQ ID NO:282; and VL1, VL2, VL3 and VL4 each comprise a CDR1 comprising an amino acid sequence having at least 80%, at least 85%, at least 90%, at least 91%, at least 92%, at least 93%, at least 94%, at least 95%, at least 96%, at least 97%, at least 98%, at least 99% or 100% identity to SEQ ID NO:276; a CDR2 comprising an amino acid sequence having at least 80%, at least 85%, at least 90%, at least 91%, at least 92%, at least 93%, at least 94%, at least 95%, at least 96%, at least 97%, at least 98%, at least 99% or 100% identity to SEQ ID NO:277 (having the sequence of LGS); and a CDR3 comprising an amino acid sequence having at least 80%, at least 85%, at least 90%, at least 91%, at least 92%, at least 93%, at least 94%, at least 95%, at least 96%, at least 97%, at least 98%, at least 99% or 100% identity to SEQ ID NO:278. In some aspects, VH1, VH2, VH3 and VH4 each comprise a CDR1 comprising the amino acid sequence of SEQ ID NO:280; a CDR2 comprising the amino acid sequence of SEQ ID NO:281; and a CDR3 comprising the amino acid sequence of SEQ ID NO:282; and VL1, VL2, VL3 and VL4 each comprise a CDR1 comprising the amino acid sequence of SEQ ID NO:276; a CDR2 comprising the amino acid sequence of SEQ ID NO:277 (having the sequence of LGS); and a CDR3 comprising the amino acid sequence of SEQ ID NO:278. In some aspects, L1-L16 comprise the amino acid sequence of any one of SEQ ID NOs:1-34, wherein SEQ ID NO:1 has the amino acid sequence of G, SEQ ID NO:2 has the amino acid sequence of A, SEQ ID NO:3 has the amino acid sequence of GSS and SEQ ID NO:4 has the amino acid sequence of ASG. In some aspects, L1 or L4 and L7 or L10 comprise the amino acid sequence of SEQ ID NO:6; L2 or L5 and L8 or L11 comprise the amino acid sequence of SEQ ID NO:27; and L3 or L6 and L9 or L12 comprise the amino acid sequence of SEQ ID NO:6. In some aspects, L1 or L5 and L9 or L13 comprise the amino acid sequence of SEQ ID NO:6; L2 or L6 and L10 or L14 comprise the amino acid sequence of SEQ ID NO:27; L3 or L7 and L11 or L15 comprise the amino acid sequence of SEQ ID NO:6; and L4 or L8 and L12 or L16 comprise the amino acid sequence of SEQ ID NO:12. In some aspects, Fc comprises a knob-into-hole modification or Fc effector function knockout mutation. In some aspects, Fc comprises an amino acid sequence having at least 80%, at least 85%, at least 90%, at least 91%, at least 92%, at least 93%, at least 94%, at least 95%, at least 96%, at least 97%, at least 98%, at least 99%, or 100% identity to SEQ ID NO:37. In some aspects, Fc comprises the amino acid sequence of SEQ ID NO:37. In some preferred aspects, CDR1, CDR2 and CDR3 of each of VH1, VH2, VH3, VH4, VL1, VL2, VL3 and VL4 have at least 90% identity with the corresponding amino acid sequences specified above, optionally with (i) an Fc having at least 90% identity with the corresponding amino acid sequence recited above; and/or (ii) one or more linker sequence as specified above. In some particularly preferred aspects, CDR1, CDR2 and CDR3 of each of VH1, VH2, VH3, VH4, VL1, VL2, VL3 and VL4 comprise or consist of the corresponding amino acid sequences specified above, optionally with (i) an Fc comprising or consisting of the corresponding amino acid sequence recited above; and/or (ii) one or more linker sequence as specified above.

[0637] In some aspects, (i) VH1 and VH3 comprise a CDR1 comprising an amino acid sequence having at least 80%, at least 85%, at least 90%, at least 91%, at least 92%, at least 93%, at least 94%, at least 95%, at least 96%, at least 97%, at least 98%, at least 99% or 100% identity to SEQ ID NO:59; a CDR2 comprising an amino acid sequence having at least 80%, at least 85%, at least 90%, at least 91%, at least 92%, at least 93%, at least 94%, at least 95%, at least 96%, at least 97%, at least 98%, at least 99% or 100% identity to SEQ ID NO:60; and a CDR3 comprising an amino acid sequence having at least 80%, at least 85%, at least 90%, at least 91%, at least 92%, at least 93%, at least 94%, at least 95%, at least 96%, at least 97%, at least 98%, at least 99% or 100% identity to SEQ ID NO:61; (ii) VH2 and VH4 comprise a CDR1 comprising an amino acid sequence having at least 80%, at least 85%, at least 90%, at least 91%, at least 92%, at least 93%, at least 94%, at least 95%, at least 96%, at least 97%, at least 98%, at least 99% or 100% identity to SEQ ID NO:264; a CDR2 comprising an amino acid sequence having at least 80%, at least 85%, at least 90%, at least 91%, at least 92%, at least 93%, at least 94%, at least 95%, at least 96%, at least 97%, at least 98%, at least 99% or 100% identity to SEQ ID NO:265; and a CDR3 comprising an amino acid sequence having at least 80%, at least 85%, at least 90%, at least 91%, at least 92%, at least 93%, at least 94%, at least 95%, at least 96%, at least 97%, at least 98%, at least 99% or 100% identity to SEQ ID NO:266; (iii) VL1 and VL3 comprise a CDR1 comprising an amino acid sequence having at least 80%, at least 85%, at least 90%, at least 91%, at least 92%, at least 93%, at least 94%, at least 95%, at least 96%, at least 97%, at least 98%, at least 99% or 100% identity to SEQ ID NO:55; a CDR2 comprising an amino acid sequence having at least 80%, at least 85%, at least 90%, at least 91%, at least 92%, at least 93%, at least 94%, at least 95%, at least 96%, at least 97%, at least 98%, at least 99% or 100% identity to SEQ ID NO:56 (having the sequence of GTN); and a CDR3 comprising an amino acid sequence having at least 80%, at least 85%, at least 90%, at least 91%, at least 92%, at least 93%, at least 94%, at least 95%, at least 96%, at least 97%, at least 98%, at least 99% or 100% identity to SEQ ID NO:57; and (iv) VL2 and VL4 comprise a CDR1 comprising an amino acid sequence having at least 80%, at least 85%, at least 90%, at least 91%, at least 92%, at least 93%, at least 94%, at least 95%, at least 96%, at least 97%, at least 98%, at least 99% or 100% identity to SEQ ID NO:260; a CDR2 comprising an amino acid sequence having at least 80%, at least 85%, at least 90%, at least 91%, at least 92%, at least 93%, at least 94%, at least 95%, at least 96%, at least 97%, at least 98%, at least 99% or 100% identity to SEQ ID NO:261; and a CDR3 comprising an amino acid sequence having at least 80%, at least 85%, at least 90%, at least 91%, at least 92%, at least 93%, at least 94%, at least 95%, at least 96%, at least 97%, at least 98%, at least 99% or 100% identity to SEQ ID NO:262. In some aspects, (i) VH1 and VH3 comprise a CDR1 comprising the amino acid sequence of SEQ ID NO:59; a CDR2 comprising the amino acid sequence of SEQ ID NO:60; and a CDR3 comprising the amino acid sequence of SEQ ID NO:61; (ii) VH2 and VH4 comprise a CDR1 comprising the amino acid sequence of SEQ ID NO:264; a CDR2 comprising the amino acid sequence of SEQ ID NO:265; and a CDR3 comprising the amino acid sequence of SEQ ID NO:266; (iii) VL1 and VL3 comprise a CDR1 comprising the amino acid sequence of SEQ ID NO:55; a CDR2 comprising the amino acid sequence of SEQ ID NO:56 (having the sequence of GTN); and a CDR3 comprising the amino acid sequence of SEQ ID NO:57; and (iv) VL2 and VL4 comprise a CDR1 comprising the amino acid sequence of SEQ ID NO:260; a CDR2 comprising the amino acid sequence of SEQ ID NO:261; and a CDR3 comprising the amino acid sequence of SEQ ID NO:262. In some aspects, L1-L16 comprise the amino acid sequence of any one of SEQ ID NOs:1-34, wherein SEQ ID NO:1 has the amino acid sequence of G, SEQ ID NO:2 has the amino acid sequence of A, SEQ ID NO:3 has the amino acid sequence of GSS and SEQ ID NO:4 has the amino acid sequence of ASG. In some aspects, L1 or L4 and L7 or L10 comprise the amino acid sequence of SEQ ID NO:6; L2 or L5 and L8 or L11 comprise the amino acid sequence of SEQ ID NO:27; and L3 or L6 and L9 or L12 comprise the amino acid sequence of SEQ ID NO:6. In some aspects, L1 or L5 and L9 or L13 comprise the amino acid sequence of SEQ ID NO:6; L2 or L6 and L10 or L14 comprise the amino acid sequence of SEQ ID NO:27; L3 or L7 and L11 or L15 comprise the amino acid sequence of SEQ ID NO:6; and L4 or L8 and L12 or L16 comprise the amino acid sequence of SEQ ID NO:12. In some aspects, Fc comprises a knob-into-hole modification or Fc effector function knockout mutation. In some aspects, Fc comprises an amino acid sequence having at least 80%, at least 85%, at least 90%, at least 91%, at least 92%, at least 93%, at least 94%, at least 95%, at least 96%, at least 97%, at least 98%, at least 99%, or 100% identity to SEQ ID NO:37. In some aspects, Fc comprises the amino acid sequence of SEQ ID NO:37. In some preferred aspects, CDR1, CDR2 and CDR3 of each of VH1, VH2, VH3, VH4, VL1, VL2, VL3 and VL4 have at least 90% identity with the corresponding amino acid sequences specified above, optionally with (i) an Fc having at least 90% identity with the corresponding amino acid sequence recited above; and/or (ii) one or more linker sequence as specified above. In some particularly preferred aspects, CDR1, CDR2 and CDR3 of each of VH1, VH2, VH3, VH4, VL1, VL2, VL3 and VL4 comprise or consist of the corresponding amino acid sequences specified above, optionally with (i) an Fc comprising or consisting of the corresponding amino acid sequence recited above; and/or (ii) one or more linker sequence as specified above.

[0638] In some aspects, (i) VH1 and VH3 comprise a CDR1 comprising an amino acid sequence having at least 80%, at least 85%, at least 90%, at least 91%, at least 92%, at least 93%, at least 94%, at least 95%, at least 96%, at least 97%, at least 98%, at least 99% or 100% identity to SEQ ID NO:280; a CDR2 comprising an amino acid sequence having at least 80%, at least 85%, at least 90%, at least 91%, at least 92%, at least 93%, at least 94%, at least 95%, at least 96%, at least 97%, at least 98%, at least 99% or 100% identity to SEQ ID NO:281; and a CDR3 comprising an amino acid sequence having at least 80%, at least 85%, at least 90%, at least 91%, at least 92%, at least 93%, at least 94%, at least 95%, at least 96%, at least 97%, at least 98%, at least 99% or 100% identity to SEQ ID NO:282; (ii) VH2 and VH4 comprise a CDR1 comprising an amino acid sequence having at least 80%, at least 85%, at least 90%, at least 91%, at least 92%, at least 93%, at least 94%, at least 95%, at least 96%, at least 97%, at least 98%, at least 99% or 100% identity to SEQ ID NO:264; a CDR2 comprising an amino acid sequence having at least 80%, at least 85%, at least 90%, at least 91%, at least 92%, at least 93%, at least 94%, at least 95%, at least 96%, at least 97%, at least 98%, at least 99% or 100% identity to SEQ ID NO:265; and a CDR3 comprising an amino acid sequence having at least 80%, at least 85%, at least 90%, at least 91%, at least 92%, at least 93%, at least 94%, at least 95%, at least 96%, at least 97%, at least 98%, at least 99% or 100% identity to SEQ ID NO:266; (iii) VL1 and VL3 comprise a CDR1 comprising an amino acid sequence having at least 80%, at least 85%, at least 90%, at least 91%, at least 92%, at least 93%, at least 94%, at least 95%, at least 96%, at least 97%, at least 98%, at least 99% or 100% identity to SEQ ID NO:276; a CDR2 comprising an amino acid sequence having at least 80%, at least 85%, at least 90%, at least 91%, at least 92%, at least 93%, at least 94%, at least 95%, at least 96%, at least 97%, at least 98%, at least 99% or 100% identity to SEQ ID NO:277 (having the sequence of LGS); and a CDR3 comprising an amino acid sequence having at least 80%, at least 85%, at least 90%, at least 91%, at least 92%, at least 93%, at least 94%, at least 95%, at least 96%, at least 97%, at least 98%, at least 99% or 100% identity to SEQ ID NO:278; and (iv) VL2 and VL4 comprise a CDR1 comprising an amino acid sequence having at least 80%, at least 85%, at least 90%, at least 91%, at least 92%, at least 93%, at least 94%, at least 95%, at least 96%, at least 97%, at least 98%, at least 99% or 100% identity to SEQ ID NO:260; a CDR2 comprising an amino acid sequence having at least 80%, at least 85%, at least 90%, at least 91%, at least 92%, at least 93%, at least 94%, at least 95%, at least 96%, at least 97%, at least 98%, at least 99% or 100% identity to SEQ ID NO:261; and a CDR3 comprising an amino acid sequence having at least 80%, at least 85%, at least 90%, at least 91%, at least 92%, at least 93%, at least 94%, at least 95%, at least 96%, at least 97%, at least 98%, at least 99% or 100% identity to SEQ ID NO:262. In some aspects, (i) VH1 and VH3 comprise a CDR1 comprising the amino acid sequence of SEQ ID NO:280; a CDR2 comprising the amino acid sequence of SEQ ID NO:281; and a CDR3 comprising the amino acid sequence of SEQ ID NO:282; (ii) VH2 and VH4 comprise a CDR1 comprising the amino acid sequence of SEQ ID NO:264; a CDR2 comprising the amino acid sequence of SEQ ID NO:265; and a CDR3 comprising the amino acid sequence of SEQ ID NO:266; (iii) VL1 and VL3 comprise a CDR1 comprising the amino acid sequence of SEQ ID NO:276; a CDR2 comprising the amino acid sequence of SEQ ID NO:277 (having the sequence of LGS); and a CDR3 comprising the amino acid sequence of SEQ ID NO:278; and (iv) VL2 and VL4 comprise a CDR1 comprising the amino acid sequence of SEQ ID NO:260; a CDR2 comprising the amino acid sequence of SEQ ID NO:261; and a CDR3 comprising the amino acid sequence of SEQ ID NO:262. In some aspects, L1-L16 comprise the amino acid sequence of any one of SEQ ID NOs:1-34, wherein SEQ ID NO:1 has the amino acid sequence of G, SEQ ID NO:2 has the amino acid sequence of A, SEQ ID NO:3 has the amino acid sequence of GSS and SEQ ID NO:4 has the amino acid sequence of ASG. In some aspects, L1 or L4 and L7 or L10 comprise the amino acid sequence of SEQ ID NO:6; L2 or L5 and L8 or L11 comprise the amino acid sequence of SEQ ID NO:27; and L3 or L6 and L9 or L12 comprise the amino acid sequence of SEQ ID NO:6. In some aspects, L1 or L5 and L9 or L13 comprise the amino acid sequence of SEQ ID NO:6; L2 or L6 and L10 or L14 comprise the amino acid sequence of SEQ ID NO:27; L3 or L7 and L11 or L15 comprise the amino acid sequence of SEQ ID NO:6; and L4 or L8 and L12 or L16 comprise the amino acid sequence of SEQ ID NO:12. In some aspects, Fc comprises a knob-into-hole modification or Fc effector function knockout mutation. In some aspects, Fc comprises an amino acid sequence having at least 80%, at least 85%, at least 90%, at least 91%, at least 92%, at least 93%, at least 94%, at least 95%, at least 96%, at least 97%, at least 98%, at least 99%, or 100% identity to SEQ ID NO:37. In some aspects, Fc comprises the amino acid sequence of SEQ ID NO:37. In some preferred aspects, CDR1, CDR2 and CDR3 of each of VH1, VH2, VH3, VH4, VL1, VL2, VL3 and VL4 have at least 90% identity with the corresponding amino acid sequences specified above, optionally with (i) an Fc having at least 90% identity with the corresponding amino acid sequence recited above; and/or (ii) one or more linker sequence as specified above. In some particularly preferred aspects, CDR1, CDR2 and CDR3 of each of VH1, VH2, VH3, VH4, VL1, VL2, VL3 and VL4 comprise or consist of the corresponding amino acid sequences specified above, optionally with (i) an Fc comprising or consisting of the corresponding amino acid sequence recited above; and/or (ii) one or more linker sequence as specified above.

[0639] In some aspects, (i) VH1 and VH3 comprise a CDR1 comprising an amino acid sequence having at least 80%, at least 85%, at least 90%, at least 91%, at least 92%, at least 93%, at least 94%, at least 95%, at least 96%, at least 97%, at least 98%, at least 99% or 100% identity to SEQ ID NO:264; a CDR2 comprising an amino acid sequence having at least 80%, at least 85%, at least 90%, at least 91%, at least 92%, at least 93%, at least 94%, at least 95%, at least 96%, at least 97%, at least 98%, at least 99% or 100% identity to SEQ ID NO:265; and a CDR3 comprising an amino acid sequence having at least 80%, at least 85%, at least 90%, at least 91%, at least 92%, at least 93%, at least 94%, at least 95%, at least 96%, at least 97%, at least 98%, at least 99% or 100% identity to SEQ ID NO:266; (ii) VH2 and VH4 comprise a CDR1 comprising an amino acid sequence having at least 80%, at least 85%, at least 90%, at least 91%, at least 92%, at least 93%, at least 94%, at least 95%, at least 96%, at least 97%, at least 98%, at least 99% or 100% identity to SEQ ID NO:59; a CDR2 comprising an amino acid sequence having at least 80%, at least 85%, at least 90%, at least 91%, at least 92%, at least 93%, at least 94%, at least 95%, at least 96%, at least 97%, at least 98%, at least 99% or 100% identity to SEQ ID NO:60; and a CDR3 comprising an amino acid sequence having at least 80%, at least 85%, at least 90%, at least 91%, at least 92%, at least 93%, at least 94%, at least 95%, at least 96%, at least 97%, at least 98%, at least 99% or 100% identity to SEQ ID NO:61; (iii) VL1 and VL3 comprise a CDR1 comprising an amino acid sequence having at least 80%, at least 85%, at least 90%, at least 91%, at least 92%, at least 93%, at least 94%, at least 95%, at least 96%, at least 97%, at least 98%, at least 99% or 100% identity to SEQ ID NO:260; a CDR2 comprising an amino acid sequence having at least 80%, at least 85%, at least 90%, at least 91%, at least 92%, at least 93%, at least 94%, at least 95%, at least 96%, at least 97%, at least 98%, at least 99% or 100% identity to SEQ ID NO:261; and a CDR3 comprising an amino acid sequence having at least 80%, at least 85%, at least 90%, at least 91%, at least 92%, at least 93%, at least 94%, at least 95%, at least 96%, at least 97%, at least 98%, at least 99% or 100% identity to SEQ ID NO:262; and (iv) VL2 and VL4 comprise a CDR1 comprising an amino acid sequence having at least 80%, at least 85%, at least 90%, at least 91%, at least 92%, at least 93%, at least 94%, at least 95%, at least 96%, at least 97%, at least 98%, at least 99% or 100% identity to SEQ ID NO:55; a CDR2 comprising an amino acid sequence having at least 80%, at least 85%, at least 90%, at least 91%, at least 92%, at least 93%, at least 94%, at least 95%, at least 96%, at least 97%, at least 98%, at least 99% or 100% identity to SEQ ID NO:56 (having the sequence of GTN); and a CDR3 comprising an amino acid sequence having at least 80%, at least 85%, at least 90%, at least 91%, at least 92%, at least 93%, at least 94%, at least 95%, at least 96%, at least 97%, at least 98%, at least 99% or 100% identity to SEQ ID NO:57. In some aspects, (i) VH1 and VH3 comprise a CDR1 comprising the amino acid sequence of SEQ ID NO:264; a CDR2 comprising the amino acid sequence of SEQ ID NO:265; and a CDR3 comprising the amino acid sequence of SEQ ID NO:266; (ii) VH2 and VH4 comprise a CDR1 comprising the amino acid sequence of SEQ ID NO:59; a CDR2 comprising the amino acid sequence of SEQ ID NO:60; and a CDR3 comprising the amino acid sequence of SEQ ID NO:61; (iii) VL1 and VL3 comprise a CDR1 comprising the amino acid sequence of SEQ ID NO:260; a CDR2 comprising the amino acid sequence of SEQ ID NO:261; and a CDR3 comprising the amino acid sequence of SEQ ID NO:262; and (iv) VL2 and VL4 comprise a CDR1 comprising the amino acid sequence of SEQ ID NO:55; a CDR2 comprising the amino acid sequence of SEQ ID NO:56 (having the sequence of GTN); and a CDR3 comprising the amino acid sequence of SEQ ID NO:57. In some aspects, L1-L16 comprise the amino acid sequence of any one of SEQ ID NOs:1-34, wherein SEQ ID NO:1 has the amino acid sequence of G, SEQ ID NO:2 has the amino acid sequence of A, SEQ ID NO:3 has the amino acid sequence of GSS and SEQ ID NO:4 has the amino acid sequence of ASG. In some aspects, L1 or L4 and L7 or L10 comprise the amino acid sequence of SEQ ID NO:6; L2 or L5 and L8 or L11 comprise the amino acid sequence of SEQ ID NO:27; and L3 or L6 and L9 or L12 comprise the amino acid sequence of SEQ ID NO:6. In some aspects, L1 or L5 and L9 or L13 comprise the amino acid sequence of SEQ ID NO:6; L2 or L6 and L10 or L14 comprise the amino acid sequence of SEQ ID NO:27; L3 or L7 and L11 or L15 comprise the amino acid sequence of SEQ ID NO:6; and L4 or L8 and L12 or L16 comprise the amino acid sequence of SEQ ID NO:12. In some aspects, Fc comprises a knob-into-hole modification or Fc effector function knockout mutation. In some aspects, Fc comprises an amino acid sequence having at least 80%, at least 85%, at least 90%, at least 91%, at least 92%, at least 93%, at least 94%, at least 95%, at least 96%, at least 97%, at least 98%, at least 99%, or 100% identity to SEQ ID NO:37. In some aspects, Fc comprises the amino acid sequence of SEQ ID NO:37. In some preferred aspects, CDR1, CDR2 and CDR3 of each of VH1, VH2, VH3, VH4, VL1, VL2, VL3 and VL4 have at least 90% identity with the corresponding amino acid sequences specified above, optionally with (i) an Fc having at least 90% identity with the corresponding amino acid sequence recited above; and/or (ii) one or more linker sequence as specified above. In some particularly preferred aspects, CDR1, CDR2 and CDR3 of each of VH1, VH2, VH3, VH4, VL1, VL2, VL3 and VL4 comprise or consist of the corresponding amino acid sequences specified above, optionally with (i) an Fc comprising or consisting of the corresponding amino acid sequence recited above; and/or (ii) one or more linker sequence as specified above.

[0640] In some aspects, (i) VH1 and VH3 comprise a CDR1 comprising an amino acid sequence having at least 80%, at least 85%, at least 90%, at least 91%, at least 92%, at least 93%, at least 94%, at least 95%, at least 96%, at least 97%, at least 98%, at least 99% or 100% identity to SEQ ID NO:264; a CDR2 comprising an amino acid sequence having at least 80%, at least 85%, at least 90%, at least 91%, at least 92%, at least 93%, at least 94%, at least 95%, at least 96%, at least 97%, at least 98%, at least 99% or 100% identity to SEQ ID NO:265; and a CDR3 comprising an amino acid sequence having at least 80%, at least 85%, at least 90%, at least 91%, at least 92%, at least 93%, at least 94%, at least 95%, at least 96%, at least 97%, at least 98%, at least 99% or 100% identity to SEQ ID NO:266; (ii) VH2 and VH4 comprise a CDR1 comprising an amino acid sequence having at least 80%, at least 85%, at least 90%, at least 91%, at least 92%, at least 93%, at least 94%, at least 95%, at least 96%, at least 97%, at least 98%, at least 99% or 100% identity to SEQ ID NO:280; a CDR2 comprising an amino acid sequence having at least 80%, at least 85%, at least 90%, at least 91%, at least 92%, at least 93%, at least 94%, at least 95%, at least 96%, at least 97%, at least 98%, at least 99% or 100% identity to SEQ ID NO:281; and a CDR3 comprising an amino acid sequence having at least 80%, at least 85%, at least 90%, at least 91%, at least 92%, at least 93%, at least 94%, at least 95%, at least 96%, at least 97%, at least 98%, at least 99% or 100% identity to SEQ ID NO:282; (iii) VL1 and VL3 comprise a CDR1 comprising an amino acid sequence having at least 80%, at least 85%, at least 90%, at least 91%, at least 92%, at least 93%, at least 94%, at least 95%, at least 96%, at least 97%, at least 98%, at least 99% or 100% identity to SEQ ID NO:260; a CDR2 comprising an amino acid sequence having at least 80%, at least 85%, at least 90%, at least 91%, at least 92%, at least 93%, at least 94%, at least 95%, at least 96%, at least 97%, at least 98%, at least 99% or 100% identity to SEQ ID NO:261; and a CDR3 comprising an amino acid sequence having at least 80%, at least 85%, at least 90%, at least 91%, at least 92%, at least 93%, at least 94%, at least 95%, at least 96%, at least 97%, at least 98%, at least 99% or 100% identity to SEQ ID NO:262; and (iv) VL2 and VL4 comprise a CDR1 comprising an amino acid sequence having at least 80%, at least 85%, at least 90%, at least 91%, at least 92%, at least 93%, at least 94%, at least 95%, at least 96%, at least 97%, at least 98%, at least 99% or 100% identity to SEQ ID NO:276; a CDR2 comprising an amino acid sequence having at least 80%, at least 85%, at least 90%, at least 91%, at least 92%, at least 93%, at least 94%, at least 95%, at least 96%, at least 97%, at least 98%, at least 99% or 100% identity to SEQ ID NO:277 (having the sequence of LGS); and a CDR3 comprising an amino acid sequence having at least 80%, at least 85%, at least 90%, at least 91%, at least 92%, at least 93%, at least 94%, at least 95%, at least 96%, at least 97%, at least 98%, at least 99% or 100% identity to SEQ ID NO:278. In some aspects, (i) VH1 and VH3 comprise a CDR1 comprising the amino acid sequence of SEQ ID NO:264; a CDR2 comprising the amino acid sequence of SEQ ID NO:265; and a CDR3 comprising the amino acid sequence of SEQ ID NO:266; (ii) VH2 and VH4 comprise a CDR1 comprising the amino acid sequence of SEQ ID NO:280; a CDR2 comprising the amino acid sequence of SEQ ID NO:281; and a CDR3 comprising the amino acid sequence of SEQ ID NO:282; (iii) VL1 and VL3 comprise a CDR1 comprising the amino acid sequence of SEQ ID NO:260; a CDR2 comprising the amino acid sequence of SEQ ID NO:261; and a CDR3 comprising the amino acid sequence of SEQ ID NO:262; and (iv) VL2 and VL4 comprise a CDR1 comprising the amino acid sequence of SEQ ID NO:276; a CDR2 comprising the amino acid sequence of SEQ ID NO:277 (having the sequence of LGS); and a CDR3 comprising the amino acid sequence of SEQ ID NO:278. In some aspects, L1 or L4 and L7 or L10 comprise the amino acid sequence of SEQ ID NO:6; L2 or L5 and L8 or L11 comprise the amino acid sequence of SEQ ID NO:27; and L3 or L6 and L9 or L12 comprise the amino acid sequence of SEQ ID NO:6. In some aspects, L1 or L5 and L9 or L13 comprise the amino acid sequence of SEQ ID NO:6; L2 or L6 and L10 or L14 comprise the amino acid sequence of SEQ ID NO:27; L3 or L7 and L11 or L15 comprise the amino acid sequence of SEQ ID NO: 6; and L4 or L8 and L12 or L16 comprise the amino acid sequence of SEQ ID NO:12. In some aspects, Fc comprises a knob-into-hole modification or Fc effector function knockout mutation. In some aspects, Fc comprises an amino acid sequence having at least 80%, at least 85%, at least 90%, at least 91%, at least 92%, at least 93%, at least 94%, at least 95%, at least 96%, at least 97%, at least 98%, at least 99%, or 100% identity to SEQ ID NO:37. In some aspects, Fc comprises the amino acid sequence of SEQ ID NO:37. In some preferred aspects, CDR1, CDR2 and CDR3 of each of VH1, VH2, VH3, VH4, VL1, VL2, VL3 and VL4 have at least 90% identity with the corresponding amino acid sequences specified above, optionally with (i) an Fc having at least 90% identity with the corresponding amino acid sequence recited above; and/or (ii) one or more linker sequence as specified above. In some particularly preferred aspects, CDR1, CDR2 and CDR3 of each of VH1, VH2, VH3, VH4, VL1, VL2, VL3 and VL4 comprise or consist of the corresponding amino acid sequences specified above, optionally with (i) an Fc comprising or consisting of the corresponding amino acid sequence recited above; and/or (ii) one or more linker sequence as specified above.

[0641] In some aspects, (i) VH1 and VH4 comprise a CDR1 comprising an amino acid sequence having at least 80%, at least 85%, at least 90%, at least 91%, at least 92%, at least 93%, at least 94%, at least 95%, at least 96%, at least 97%, at least 98%, at least 99% or 100% identity to SEQ ID NO:264; a CDR2 comprising an amino acid sequence having at least 80%, at least 85%, at least 90%, at least 91%, at least 92%, at least 93%, at least 94%, at least 95%, at least 96%, at least 97%, at least 98%, at least 99% or 100% identity to SEQ ID NO:265; and a CDR3 comprising an amino acid sequence having at least 80%, at least 85%, at least 90%, at least 91%, at least 92%, at least 93%, at least 94%, at least 95%, at least 96%, at least 97%, at least 98%, at least 99% or 100% identity to SEQ ID NO:266; (ii) VH2 and VH3 comprise a CDR1 comprising an amino acid sequence having at least 80%, at least 85%, at least 90%, at least 91%, at least 92%, at least 93%, at least 94%, at least 95%, at least 96%, at least 97%, at least 98%, at least 99% or 100% identity to SEQ ID NO:59; a CDR2 comprising an amino acid sequence having at least 80%, at least 85%, at least 90%, at least 91%, at least 92%, at least 93%, at least 94%, at least 95%, at least 96%, at least 97%, at least 98%, at least 99% or 100% identity to SEQ ID NO:60; and a CDR3 comprising an amino acid sequence having at least 80%, at least 85%, at least 90%, at least 91%, at least 92%, at least 93%, at least 94%, at least 95%, at least 96%, at least 97%, at least 98%, at least 99% or 100% identity to SEQ ID NO:61; (iii) VL1 and VL4 comprise a CDR1 comprising an amino acid sequence having at least 80%, at least 85%, at least 90%, at least 91%, at least 92%, at least 93%, at least 94%, at least 95%, at least 96%, at least 97%, at least 98%, at least 99% or 100% identity to SEQ ID NO:260; a CDR2 comprising an amino acid sequence having at least 80%, at least 85%, at least 90%, at least 91%, at least 92%, at least 93%, at least 94%, at least 95%, at least 96%, at least 97%, at least 98%, at least 99% or 100% identity to SEQ ID NO:261; and a CDR3 comprising an amino acid sequence having at least 80%, at least 85%, at least 90%, at least 91%, at least 92%, at least 93%, at least 94%, at least 95%, at least 96%, at least 97%, at least 98%, at least 99% or 100% identity to SEQ ID NO:262; and (iv) VL2 and VL3 comprise a CDR1 comprising an amino acid sequence having at least 80%, at least 85%, at least 90%, at least 91%, at least 92%, at least 93%, at least 94%, at least 95%, at least 96%, at least 97%, at least 98%, at least 99% or 100% identity to SEQ ID NO:55; a CDR2 comprising an amino acid sequence having at least 80%, at least 85%, at least 90%, at least 91%, at least 92%, at least 93%, at least 94%, at least 95%, at least 96%, at least 97%, at least 98%, at least 99% or 100% identity to SEQ ID NO:56 (having the sequence of GTN); and a CDR3 comprising an amino acid sequence having at least 80%, at least 85%, at least 90%, at least 91%, at least 92%, at least 93%, at least 94%, at least 95%, at least 96%, at least 97%, at least 98%, at least 99% or 100% identity to SEQ ID NO:57. In some aspects, (i) VH1 and VH4 comprise a CDR1 comprising the amino acid sequence of SEQ ID NO:264; a CDR2 comprising the amino acid sequence of SEQ ID NO:265; and a CDR3 comprising the amino acid sequence of SEQ ID NO:266; (ii) VH2 and VH3 comprise a CDR1 comprising the amino acid sequence of SEQ ID NO:59; a CDR2 comprising the amino acid sequence of SEQ ID NO:60; and a CDR3 comprising the amino acid sequence of SEQ ID NO:61; (iii) VL1 and VL4 comprise a CDR1 comprising the amino acid sequence of SEQ ID NO:260; a CDR2 comprising the amino acid sequence of SEQ ID NO:261; and a CDR3 comprising the amino acid sequence of SEQ ID NO:262; and (iv) VL2 and VL3 comprise a CDR1 comprising the amino acid sequence of SEQ ID NO:55; a CDR2 comprising the amino acid sequence of SEQ ID NO:56 (having the sequence of GTN); and a CDR3 comprising the amino acid sequence of SEQ ID NO:57. In some aspects, L1-L16 comprise the amino acid sequence of any one of SEQ ID NOs:1-34, wherein SEQ ID NO:1 has the amino acid sequence of G, SEQ ID NO:2 has the amino acid sequence of A, SEQ ID NO:3 has the amino acid sequence of GSS and SEQ ID NO:4 has the amino acid sequence of ASG. In some aspects, L1 or L4 and L7 or L10 comprise the amino acid sequence of SEQ ID NO:6; L2 or L5 and L8 or L11 comprise the amino acid sequence of SEQ ID NO:27; and L3 or L6 and L9 or L12 comprise the amino acid sequence of SEQ ID NO:6. In some aspects, L1 or L5 and L9 or L13 comprise the amino acid sequence of SEQ ID NO:6; L2 or L6 and L10 or L14 comprise the amino acid sequence of SEQ ID NO:27; L3 or L7 and L11 or L15 comprise the amino acid sequence of SEQ ID NO:6; and L4 or L8 and L12 or L16 comprise the amino acid sequence of SEQ ID NO:12. In some aspects, Fc comprises a knob-into-hole modification or Fc effector function knockout mutation. In some aspects, Fc comprises an amino acid sequence having at least 80%, at least 85%, at least 90%, at least 91%, at least 92%, at least 93%, at least 94%, at least 95%, at least 96%, at least 97%, at least 98%, at least 99%, or 100% identity to SEQ ID NO:293 or 294. In some aspects, Fc comprises the amino acid sequence of SEQ ID NO:293 or 294. In some preferred aspects, CDR1, CDR2 and CDR3 of each of VH1, VH2, VH3, VH4, VL1, VL2, VL3 and VL4 have at least 90% identity with the corresponding amino acid sequences specified above, optionally with (i) an Fc having at least 90% identity with the corresponding amino acid sequence recited above; and/or (ii) one or more linker sequence as specified above. In some particularly preferred aspects, CDR1, CDR2 and CDR3 of each of VH1, VH2, VH3, VH4, VL1, VL2, VL3 and VL4 comprise or consist of the corresponding amino acid sequences specified above, optionally with (i) an Fc comprising or consisting of the corresponding amino acid sequence recited above; and/or (ii) one or more linker sequence as specified above.

[0642] In some aspects, (i) VH1 and VH4 comprise a CDR1 comprising an amino acid sequence having at least 80%, at least 85%, at least 90%, at least 91%, at least 92%, at least 93%, at least 94%, at least 95%, at least 96%, at least 97%, at least 98%, at least 99% or 100% identity to SEQ ID NO:264; a CDR2 comprising an amino acid sequence having at least 80%, at least 85%, at least 90%, at least 91%, at least 92%, at least 93%, at least 94%, at least 95%, at least 96%, at least 97%, at least 98%, at least 99% or 100% identity to SEQ ID NO:265; and a CDR3 comprising an amino acid sequence having at least 80%, at least 85%, at least 90%, at least 91%, at least 92%, at least 93%, at least 94%, at least 95%, at least 96%, at least 97%, at least 98%, at least 99% or 100% identity to SEQ ID NO:266; (ii) VH2 and VH3 comprise a CDR1 comprising an amino acid sequence having at least 80%, at least 85%, at least 90%, at least 91%, at least 92%, at least 93%, at least 94%, at least 95%, at least 96%, at least 97%, at least 98%, at least 99% or 100% identity to SEQ ID NO:280; a CDR2 comprising an amino acid sequence having at least 80%, at least 85%, at least 90%, at least 91%, at least 92%, at least 93%, at least 94%, at least 95%, at least 96%, at least 97%, at least 98%, at least 99% or 100% identity to SEQ ID NO:281; and a CDR3 comprising an amino acid sequence having at least 80%, at least 85%, at least 90%, at least 91%, at least 92%, at least 93%, at least 94%, at least 95%, at least 96%, at least 97%, at least 98%, at least 99% or 100% identity to SEQ ID NO:282; (iii) VL1 and VL4 comprise a CDR1 comprising an amino acid sequence having at least 80%, at least 85%, at least 90%, at least 91%, at least 92%, at least 93%, at least 94%, at least 95%, at least 96%, at least 97%, at least 98%, at least 99% or 100% identity to SEQ ID NO:260; a CDR2 comprising an amino acid sequence having at least 80%, at least 85%, at least 90%, at least 91%, at least 92%, at least 93%, at least 94%, at least 95%, at least 96%, at least 97%, at least 98%, at least 99% or 100% identity to SEQ ID NO:261; and a CDR3 comprising an amino acid sequence having at least 80%, at least 85%, at least 90%, at least 91%, at least 92%, at least 93%, at least 94%, at least 95%, at least 96%, at least 97%, at least 98%, at least 99% or 100% identity to SEQ ID NO:262; and (iv) VL2 and VL3 comprise a CDR1 comprising an amino acid sequence having at least 80%, at least 85%, at least 90%, at least 91%, at least 92%, at least 93%, at least 94%, at least 95%, at least 96%, at least 97%, at least 98%, at least 99% or 100% identity to SEQ ID NO:276; a CDR2 comprising an amino acid sequence having at least 80%, at least 85%, at least 90%, at least 91%, at least 92%, at least 93%, at least 94%, at least 95%, at least 96%, at least 97%, at least 98%, at least 99% or 100% identity to SEQ ID NO:277 (having the sequence of LGS); and a CDR3 comprising an amino acid sequence having at least 80%, at least 85%, at least 90%, at least 91%, at least 92%, at least 93%, at least 94%, at least 95%, at least 96%, at least 97%, at least 98%, at least 99% or 100% identity to SEQ ID NO:278. In some aspects, (i) VH1 and VH4 comprise a CDR1 comprising the amino acid sequence of SEQ ID NO:264; a CDR2 comprising the amino acid sequence of SEQ ID NO:265; and a CDR3 comprising the amino acid sequence of SEQ ID NO:266; (ii) VH2 and VH3 comprise a CDR1 comprising the amino acid sequence of SEQ ID NO:280; a CDR2 comprising the amino acid sequence of SEQ ID NO:281; and a CDR3 comprising the amino acid sequence of SEQ ID NO:282; (iii) VL1 and VL4 comprise a CDR1 comprising the amino acid sequence of SEQ ID NO:260; a CDR2 comprising the amino acid sequence of SEQ ID NO:261; and a CDR3 comprising the amino acid sequence of SEQ ID NO:262; and (iv) VL2 and VL3 comprise a CDR1 comprising the amino acid sequence of SEQ ID NO:276; a CDR2 comprising the amino acid sequence of SEQ ID NO:277 (having the sequence of LGS); and a CDR3 comprising the amino acid sequence of SEQ ID NO:278. In some aspects, L1-L16 comprise the amino acid sequence of any one of SEQ ID NOs:1-34, wherein SEQ ID NO:1 has the amino acid sequence of G, SEQ ID NO:2 has the amino acid sequence of A, SEQ ID NO:3 has the amino acid sequence of GSS and SEQ ID NO:4 has the amino acid sequence of ASG. In some aspects, L1 or L4 and L7 or L10 comprise the amino acid sequence of SEQ ID NO:6; L2 or L5 and L8 or L11 comprise the amino acid sequence of SEQ ID NO:27; and L3 or L6 and L9 or L12 comprise the amino acid sequence of SEQ ID NO:6. In some aspects, L1 or L5 and L9 or L13 comprise the amino acid sequence of SEQ ID NO:6; L2 or L6 and L10 or L14 comprise the amino acid sequence of SEQ ID NO:27; L3 or L7 and L11 or L15 comprise the amino acid sequence of SEQ ID NO:6; and L4 or L8 and L12 or L16 comprise the amino acid sequence of SEQ ID NO:12. In some aspects, Fc comprises a knob-into-hole modification or Fc effector function knockout mutation. In some aspects, Fc comprises an amino acid sequence having at least 80%, at least 85%, at least 90%, at least 91%, at least 92%, at least 93%, at least 94%, at least 95%, at least 96%, at least 97%, at least 98%, at least 99%, or 100% identity to SEQ ID NO:293 or 294. In some aspects, Fc comprises the amino acid sequence of SEQ ID NO:293 or 294. In some preferred aspects, CDR1, CDR2 and CDR3 of each of VH1, VH2, VH3, VH4, VL1, VL2, VL3 and VL4 have at least 90% identity with the corresponding amino acid sequences specified above, optionally with (i) an Fc having at least 90% identity with the corresponding amino acid sequence recited above; and/or (ii) one or more linker sequence as specified above. In some particularly preferred aspects, CDR1, CDR2 and CDR3 of each of VH1, VH2, VH3, VH4, VL1, VL2, VL3 and VL4 comprise or consist of the corresponding amino acid sequences specified above, optionally with (i) an Fc comprising or consisting of the corresponding amino acid sequence recited above; and/or (ii) one or more linker sequence as specified above.

[0643] In some aspects, (i) VH1 and VH3 comprise a CDR1 comprising an amino acid sequence having at least 80%, at least 85%, at least 90%, at least 91%, at least 92%, at least 93%, at least 94%, at least 95%, at least 96%, at least 97%, at least 98%, at least 99% or 100% identity to SEQ ID NO:59; a CDR2 comprising an amino acid sequence having at least 80%, at least 85%, at least 90%, at least 91%, at least 92%, at least 93%, at least 94%, at least 95%, at least 96%, at least 97%, at least 98%, at least 99% or 100% identity to SEQ ID NO:60; and a CDR3 comprising an amino acid sequence having at least 80%, at least 85%, at least 90%, at least 91%, at least 92%, at least 93%, at least 94%, at least 95%, at least 96%, at least 97%, at least 98%, at least 99% or 100% identity to SEQ ID NO:61; (ii) VH2 and VH4 comprise a CDR1 comprising an amino acid sequence having at least 80%, at least 85%, at least 90%, at least 91%, at least 92%, at least 93%, at least 94%, at least 95%, at least 96%, at least 97%, at least 98%, at least 99% or 100% identity to SEQ ID NO:272; a CDR2 comprising an amino acid sequence having at least 80%, at least 85%, at least 90%, at least 91%, at least 92%, at least 93%, at least 94%, at least 95%, at least 96%, at least 97%, at least 98%, at least 99% or 100% identity to SEQ ID NO:273; and a CDR3 comprising an amino acid sequence having at least 80%, at least 85%, at least 90%, at least 91%, at least 92%, at least 93%, at least 94%, at least 95%, at least 96%, at least 97%, at least 98%, at least 99% or 100% identity to SEQ ID NO:274; (iii) VL1 and VL3 comprise a CDR1 comprising an amino acid sequence having at least 80%, at least 85%, at least 90%, at least 91%, at least 92%, at least 93%, at least 94%, at least 95%, at least 96%, at least 97%, at least 98%, at least 99% or 100% identity to SEQ ID NO:55; a CDR2 comprising an amino acid sequence having at least 80%, at least 85%, at least 90%, at least 91%, at least 92%, at least 93%, at least 94%, at least 95%, at least 96%, at least 97%, at least 98%, at least 99% or 100% identity to SEQ ID NO:56 (having the sequence of GTN); and a CDR3 comprising an amino acid sequence having at least 80%, at least 85%, at least 90%, at least 91%, at least 92%, at least 93%, at least 94%, at least 95%, at least 96%, at least 97%, at least 98%, at least 99% or 100% identity to SEQ ID NO:57; and (iv) VL2 and VL4 comprise a CDR1 comprising an amino acid sequence having at least 80%, at least 85%, at least 90%, at least 91%, at least 92%, at least 93%, at least 94%, at least 95%, at least 96%, at least 97%, at least 98%, at least 99% or 100% identity to SEQ ID NO:268; a CDR2 comprising an amino acid sequence having at least 80%, at least 85%, at least 90%, at least 91%, at least 92%, at least 93%, at least 94%, at least 95%, at least 96%, at least 97%, at least 98%, at least 99% or 100% identity to SEQ ID NO:269 (having the sequence of GAS); and a CDR3 comprising an amino acid sequence having at least 80%, at least 85%, at least 90%, at least 91%, at least 92%, at least 93%, at least 94%, at least 95%, at least 96%, at least 97%, at least 98%, at least 99% or 100% identity to SEQ ID NO:270. In some aspects, (i) VH1 and VH3 comprise a CDR1 comprising the amino acid sequence of SEQ ID NO:59; a CDR2 comprising the amino acid sequence of SEQ ID NO:60; and a CDR3 comprising the amino acid sequence of SEQ ID NO:61; (ii) VH2 and VH4 comprise a CDR1 comprising the amino acid sequence of SEQ ID NO:272; a CDR2 comprising the amino acid sequence of SEQ ID NO:273; and a CDR3 comprising the amino acid sequence of SEQ ID NO:274; (iii) VL1 and VL3 comprise a CDR1 comprising the amino acid sequence of SEQ ID NO:55; a CDR2 comprising the amino acid sequence of SEQ ID NO:56 (having the sequence of GTN); and a CDR3 comprising the amino acid sequence of SEQ ID NO:57; and (iv) VL2 and VL4 comprise a CDR1 comprising the amino acid sequence of SEQ ID NO:268; a CDR2 comprising the amino acid sequence of SEQ ID NO:269 (having the sequence of GAS); and a CDR3 comprising the amino acid sequence of SEQ ID NO:270. In some aspects, L1-L16 comprise the amino acid sequence of any one of SEQ ID NOs:1-34, wherein SEQ ID NO:1 has the amino acid sequence of G, SEQ ID NO:2 has the amino acid sequence of A, SEQ ID NO:3 has the amino acid sequence of GSS and SEQ ID NO:4 has the amino acid sequence of ASG. In some aspects, L1 or L4 and L7 or L10 comprise the amino acid sequence of SEQ ID NO:6; L2 or L5 and L8 or L11 comprise the amino acid sequence of SEQ ID NO:27; and L3 or L6 and L9 or L12 comprise the amino acid sequence of SEQ ID NO:6. In some aspects, L1 or L5 and L9 or L13 comprise the amino acid sequence of SEQ ID NO:6; L2 or L6 and L10 or L14 comprise the amino acid sequence of SEQ ID NO:27; L3 or L7 and L11 or L15 comprise the amino acid sequence of SEQ ID NO:6; and L4 or L8 and L12 or L16 comprise the amino acid sequence of SEQ ID NO:12. In some aspects, Fc comprises a knob-into-hole modification or Fc effector function knockout mutation. In some aspects, Fc comprises an amino acid sequence having at least 80%, at least 85%, at least 90%, at least 91%, at least 92%, at least 93%, at least 94%, at least 95%, at least 96%, at least 97%, at least 98%, at least 99%, or 100% identity to SEQ ID NO:37. In some aspects, Fc comprises the amino acid sequence of SEQ ID NO:37. In some preferred aspects, CDR1, CDR2 and CDR3 of each of VH1, VH2, VH3, VH4, VL1, VL2, VL3 and VL4 have at least 90% identity with the corresponding amino acid sequences specified above, optionally with (i) an Fc having at least 90% identity with the corresponding amino acid sequence recited above; and/or (ii) one or more linker sequence as specified above. In some particularly preferred aspects, CDR1, CDR2 and CDR3 of each of VH1, VH2, VH3, VH4, VL1, VL2, VL3 and VL4 comprise or consist of the corresponding amino acid sequences specified above, optionally with (i) an Fc comprising or consisting of the corresponding amino acid sequence recited above; and/or (ii) one or more linker sequence as specified above.

[0644] In some aspects, (i) VH1 and VH3 comprise a CDR1 comprising an amino acid sequence having at least 80%, at least 85%, at least 90%, at least 91%, at least 92%, at least 93%, at least 94%, at least 95%, at least 96%, at least 97%, at least 98%, at least 99% or 100% identity to SEQ ID NO:280; a CDR2 comprising an amino acid sequence having at least 80%, at least 85%, at least 90%, at least 91%, at least 92%, at least 93%, at least 94%, at least 95%, at least 96%, at least 97%, at least 98%, at least 99% or 100% identity to SEQ ID NO:281; and a CDR3 comprising an amino acid sequence having at least 80%, at least 85%, at least 90%, at least 91%, at least 92%, at least 93%, at least 94%, at least 95%, at least 96%, at least 97%, at least 98%, at least 99% or 100% identity to SEQ ID NO:282; (ii) VH2 and VH4 comprise a CDR1 comprising an amino acid sequence having at least 80%, at least 85%, at least 90%, at least 91%, at least 92%, at least 93%, at least 94%, at least 95%, at least 96%, at least 97%, at least 98%, at least 99% or 100% identity to SEQ ID NO:272; a CDR2 comprising an amino acid sequence having at least 80%, at least 85%, at least 90%, at least 91%, at least 92%, at least 93%, at least 94%, at least 95%, at least 96%, at least 97%, at least 98%, at least 99% or 100% identity to SEQ ID NO:273; and a CDR3 comprising an amino acid sequence having at least 80%, at least 85%, at least 90%, at least 91%, at least 92%, at least 93%, at least 94%, at least 95%, at least 96%, at least 97%, at least 98%, at least 99% or 100% identity to SEQ ID NO:274; (iii) VL1 and VL3 comprise a CDR1 comprising an amino acid sequence having at least 80%, at least 85%, at least 90%, at least 91%, at least 92%, at least 93%, at least 94%, at least 95%, at least 96%, at least 97%, at least 98%, at least 99% or 100% identity to SEQ ID NO:276; a CDR2 comprising an amino acid sequence having at least 80%, at least 85%, at least 90%, at least 91%, at least 92%, at least 93%, at least 94%, at least 95%, at least 96%, at least 97%, at least 98%, at least 99% or 100% identity to SEQ ID NO:277 (having the sequence of LGS); and a CDR3 comprising an amino acid sequence having at least 80%, at least 85%, at least 90%, at least 91%, at least 92%, at least 93%, at least 94%, at least 95%, at least 96%, at least 97%, at least 98%, at least 99% or 100% identity to SEQ ID NO:278; and (iv) VL2 and VL4 comprise a CDR1 comprising an amino acid sequence having at least 80%, at least 85%, at least 90%, at least 91%, at least 92%, at least 93%, at least 94%, at least 95%, at least 96%, at least 97%, at least 98%, at least 99% or 100% identity to SEQ ID NO:268; a CDR2 comprising an amino acid sequence having at least 80%, at least 85%, at least 90%, at least 91%, at least 92%, at least 93%, at least 94%, at least 95%, at least 96%, at least 97%, at least 98%, at least 99% or 100% identity to SEQ ID NO:269 (having the sequence of GAS); and a CDR3 comprising an amino acid sequence having at least 80%, at least 85%, at least 90%, at least 91%, at least 92%, at least 93%, at least 94%, at least 95%, at least 96%, at least 97%, at least 98%, at least 99% or 100% identity to SEQ ID NO:270. In some aspects, (i) VH1 and VH3 comprise a CDR1 comprising the amino acid sequence of SEQ ID NO:280; a CDR2 comprising the amino acid sequence of SEQ ID NO:281; and a CDR3 comprising the amino acid sequence of SEQ ID NO:282; (ii) VH2 and VH4 comprise a CDR1 comprising the amino acid sequence of SEQ ID NO:272; a CDR2 comprising the amino acid sequence of SEQ ID NO:273; and a CDR3 comprising the amino acid sequence of SEQ ID NO:274; (iii) VL1 and VL3 comprise a CDR1 comprising the amino acid sequence of SEQ ID NO:276; a CDR2 comprising the amino acid sequence of SEQ ID NO:277 (having the sequence of LGS); and a CDR3 comprising the amino acid sequence of SEQ ID NO:278; and (iv) VL2 and VL4 comprise a CDR1 comprising the amino acid sequence of SEQ ID NO:268; a CDR2 comprising the amino acid sequence of SEQ ID NO:269 (having the sequence of GAS); and a CDR3 comprising the amino acid sequence of SEQ ID NO:270. In some aspects, L1-L16 comprise the amino acid sequence of any one of SEQ ID NOs:1-34, wherein SEQ ID NO:1 has the amino acid sequence of G, SEQ ID NO:2 has the amino acid sequence of A, SEQ ID NO:3 has the amino acid sequence of GSS and SEQ ID NO:4 has the amino acid sequence of ASG. In some aspects, L1 or L4 and L7 or L10 comprise the amino acid sequence of SEQ ID NO:6; L2 or L5 and L8 or L11 comprise the amino acid sequence of SEQ ID NO:27; and L3 or L6 and L9 or L12 comprise the amino acid sequence of SEQ ID NO:6. In some aspects, L1 or L5 and L9 or L13 comprise the amino acid sequence of SEQ ID NO:6; L2 or L6 and L10 or L14 comprise the amino acid sequence of SEQ ID NO:27; L3 or L7 and L11 or L15 comprise the amino acid sequence of SEQ ID NO:6; and L4 or L8 and L12 or L16 comprise the amino acid sequence of SEQ ID NO:12. In some aspects, Fc comprises a knob-into-hole modification or Fc effector function knockout mutation. In some aspects, Fc comprises an amino acid sequence having at least 80%, at least 85%, at least 90%, at least 91%, at least 92%, at least 93%, at least 94%, at least 95%, at least 96%, at least 97%, at least 98%, at least 99%, or 100% identity to SEQ ID NO:37. In some aspects, Fc comprises the amino acid sequence of SEQ ID NO:37. In some preferred aspects, CDR1, CDR2 and CDR3 of each of VH1, VH2, VH3, VH4, VL1, VL2, VL3 and VL4 have at least 90% identity with the corresponding amino acid sequences specified above, optionally with (i) an Fc having at least 90% identity with the corresponding amino acid sequence recited above; and/or (ii) one or more linker sequence as specified above. In some particularly preferred aspects, CDR1, CDR2 and CDR3 of each of VH1, VH2, VH3, VH4, VL1, VL2, VL3 and VL4 comprise or consist of the corresponding amino acid sequences specified above, optionally with (i) an Fc comprising or consisting of the corresponding amino acid sequence recited above; and/or (ii) one or more linker sequence as specified above.

[0645] In some aspects, (i) VH1 and VH3 comprise a CDR1 comprising an amino acid sequence having at least 80%, at least 85%, at least 90%, at least 91%, at least 92%, at least 93%, at least 94%, at least 95%, at least 96%, at least 97%, at least 98%, at least 99% or 100% identity to SEQ ID NO:272; a CDR2 comprising an amino acid sequence having at least 80%, at least 85%, at least 90%, at least 91%, at least 92%, at least 93%, at least 94%, at least 95%, at least 96%, at least 97%, at least 98%, at least 99% or 100% identity to SEQ ID NO:273; and a CDR3 comprising an amino acid sequence having at least 80%, at least 85%, at least 90%, at least 91%, at least 92%, at least 93%, at least 94%, at least 95%, at least 96%, at least 97%, at least 98%, at least 99% or 100% identity to SEQ ID NO:274; (ii) VH2 and VH4 comprise a CDR1 comprising an amino acid sequence having at least 80%, at least 85%, at least 90%, at least 91%, at least 92%, at least 93%, at least 94%, at least 95%, at least 96%, at least 97%, at least 98%, at least 99% or 100% identity to SEQ ID NO:59; a CDR2 comprising an amino acid sequence having at least 80%, at least 85%, at least 90%, at least 91%, at least 92%, at least 93%, at least 94%, at least 95%, at least 96%, at least 97%, at least 98%, at least 99% or 100% identity to SEQ ID NO:60; and a CDR3 comprising an amino acid sequence having at least 80%, at least 85%, at least 90%, at least 91%, at least 92%, at least 93%, at least 94%, at least 95%, at least 96%, at least 97%, at least 98%, at least 99% or 100% identity to SEQ ID NO:61; (iii) VL1 and VL3 comprise a CDR1 comprising an amino acid sequence having at least 80%, at least 85%, at least 90%, at least 91%, at least 92%, at least 93%, at least 94%, at least 95%, at least 96%, at least 97%, at least 98%, at least 99% or 100% identity to SEQ ID NO:268; a CDR2 comprising an amino acid sequence having at least 80%, at least 85%, at least 90%, at least 91%, at least 92%, at least 93%, at least 94%, at least 95%, at least 96%, at least 97%, at least 98%, at least 99% or 100% identity to SEQ ID NO:269 (having the sequence of GAS); and a CDR3 comprising an amino acid sequence having at least 80%, at least 85%, at least 90%, at least 91%, at least 92%, at least 93%, at least 94%, at least 95%, at least 96%, at least 97%, at least 98%, at least 99% or 100% identity to SEQ ID NO:270; and (iv) VL2 and VL4 comprise a CDR1 comprising an amino acid sequence having at least 80%, at least 85%, at least 90%, at least 91%, at least 92%, at least 93%, at least 94%, at least 95%, at least 96%, at least 97%, at least 98%, at least 99% or 100% identity to SEQ ID NO:55; a CDR2 comprising an amino acid sequence having at least 80%, at least 85%, at least 90%, at least 91%, at least 92%, at least 93%, at least 94%, at least 95%, at least 96%, at least 97%, at least 98%, at least 99% or 100% identity to SEQ ID NO:56 (having the sequence of GTN); and a CDR3 comprising an amino acid sequence having at least 80%, at least 85%, at least 90%, at least 91%, at least 92%, at least 93%, at least 94%, at least 95%, at least 96%, at least 97%, at least 98%, at least 99% or 100% identity to SEQ ID NO:57. In some aspects, (i) VH1 and VH3 comprise a CDR1 comprising the amino acid sequence of SEQ ID NO:272; a CDR2 comprising the amino acid sequence of SEQ ID NO:273; and a CDR3 comprising the amino acid sequence of SEQ ID NO:274; (ii) VH2 and VH4 comprise a CDR1 comprising the amino acid sequence of SEQ ID NO:59; a CDR2 comprising the amino acid sequence of SEQ ID NO:60; and a CDR3 comprising the amino acid sequence of SEQ ID NO:61; (iii) VL1 and VL3 comprise a CDR1 comprising the amino acid sequence of SEQ ID NO:268; a CDR2 comprising the amino acid sequence of SEQ ID NO:269 (having the sequence of GAS); and a CDR3 comprising the amino acid sequence of SEQ ID NO:270; and (iv) VL2 and VL4 comprise a CDR1 comprising the amino acid sequence of SEQ ID NO:55; a CDR2 comprising the amino acid sequence of SEQ ID NO:56 (having the sequence of GTN); and a CDR3 comprising the amino acid sequence of SEQ ID NO:57. In some aspects, L1-L16 comprise the amino acid sequence of any one of SEQ ID NOs:1-34, wherein SEQ ID NO:1 has the amino acid sequence of G, SEQ ID NO:2 has the amino acid sequence of A, SEQ ID NO:3 has the amino acid sequence of GSS and SEQ ID NO:4 has the amino acid sequence of ASG. In some aspects, L1 or L4 and L7 or L10 comprise the amino acid sequence of SEQ ID NO:6; L2 or L5 and L8 or L11 comprise the amino acid sequence of SEQ ID NO:27; and L3 or L6 and L9 or L12 comprise the amino acid sequence of SEQ ID NO:6. In some aspects, L1 or L5 and L9 or L13 comprise the amino acid sequence of SEQ ID NO:6; L2 or L6 and L10 or L14 comprise the amino acid sequence of SEQ ID NO:27; L3 or L7 and L11 or L15 comprise the amino acid sequence of SEQ ID NO:6; and L4 or L8 and L12 or L16 comprise the amino acid sequence of SEQ ID NO:12. In some aspects, Fc comprises a knob-into-hole modification or Fc effector function knockout mutation. In some aspects, Fc comprises an amino acid sequence having at least 80%, at least 85%, at least 90%, at least 91%, at least 92%, at least 93%, at least 94%, at least 95%, at least 96%, at least 97%, at least 98%, at least 99%, or 100% identity to SEQ ID NO:37. In some aspects, Fc comprises the amino acid sequence of SEQ ID NO:37. In some preferred aspects, CDR1, CDR2 and CDR3 of each of VH1, VH2, VH3, VH4, VL1, VL2, VL3 and VL4 have at least 90% identity with the corresponding amino acid sequences specified above, optionally with (i) an Fc having at least 90% identity with the corresponding amino acid sequence recited above; and/or (ii) one or more linker sequence as specified above. In some particularly preferred aspects, CDR1, CDR2 and CDR3 of each of VH1, VH2, VH3, VH4, VL1, VL2, VL3 and VL4 comprise or consist of the corresponding amino acid sequences specified above, optionally with (i) an Fc comprising or consisting of the corresponding amino acid sequence recited above; and/or (ii) one or more linker sequence as specified above.

[0646] In some aspects, (i) VH1 and VH3 comprise a CDR1 comprising an amino acid sequence having at least 80%, at least 85%, at least 90%, at least 91%, at least 92%, at least 93%, at least 94%, at least 95%, at least 96%, at least 97%, at least 98%, at least 99% or 100% identity to SEQ ID NO:272; a CDR2 comprising an amino acid sequence having at least 80%, at least 85%, at least 90%, at least 91%, at least 92%, at least 93%, at least 94%, at least 95%, at least 96%, at least 97%, at least 98%, at least 99% or 100% identity to SEQ ID NO:273; and a CDR3 comprising an amino acid sequence having at least 80%, at least 85%, at least 90%, at least 91%, at least 92%, at least 93%, at least 94%, at least 95%, at least 96%, at least 97%, at least 98%, at least 99% or 100% identity to SEQ ID NO:274; (ii) VH2 and VH4 comprise a CDR1 comprising an amino acid sequence having at least 80%, at least 85%, at least 90%, at least 91%, at least 92%, at least 93%, at least 94%, at least 95%, at least 96%, at least 97%, at least 98%, at least 99% or 100% identity to SEQ ID NO:280; a CDR2 comprising an amino acid sequence having at least 80%, at least 85%, at least 90%, at least 91%, at least 92%, at least 93%, at least 94%, at least 95%, at least 96%, at least 97%, at least 98%, at least 99% or 100% identity to SEQ ID NO:281; and a CDR3 comprising an amino acid sequence having at least 80%, at least 85%, at least 90%, at least 91%, at least 92%, at least 93%, at least 94%, at least 95%, at least 96%, at least 97%, at least 98%, at least 99% or 100% identity to SEQ ID NO:282; (iii) VL1 and VL3 comprise a CDR1 comprising an amino acid sequence having at least 80%, at least 85%, at least 90%, at least 91%, at least 92%, at least 93%, at least 94%, at least 95%, at least 96%, at least 97%, at least 98%, at least 99% or 100% identity to SEQ ID NO:268; a CDR2 comprising an amino acid sequence having at least 80%, at least 85%, at least 90%, at least 91%, at least 92%, at least 93%, at least 94%, at least 95%, at least 96%, at least 97%, at least 98%, at least 99% or 100% identity to SEQ ID NO:269 (having the sequence of GAS); and a CDR3 comprising an amino acid sequence having at least 80%, at least 85%, at least 90%, at least 91%, at least 92%, at least 93%, at least 94%, at least 95%, at least 96%, at least 97%, at least 98%, at least 99% or 100% identity to SEQ ID NO:270; and (iv) VL2 and VL4 comprise a CDR1 comprising an amino acid sequence having at least 80%, at least 85%, at least 90%, at least 91%, at least 92%, at least 93%, at least 94%, at least 95%, at least 96%, at least 97%, at least 98%, at least 99% or 100% identity to SEQ ID NO:276; a CDR2 comprising an amino acid sequence having at least 80%, at least 85%, at least 90%, at least 91%, at least 92%, at least 93%, at least 94%, at least 95%, at least 96%, at least 97%, at least 98%, at least 99% or 100% identity to SEQ ID NO:277 (having the sequence of LGS); and a CDR3 comprising an amino acid sequence having at least 80%, at least 85%, at least 90%, at least 91%, at least 92%, at least 93%, at least 94%, at least 95%, at least 96%, at least 97%, at least 98%, at least 99% or 100% identity to SEQ ID NO:278. In some aspects, (i) VH1 and VH3 comprise a CDR1 comprising the amino acid sequence of SEQ ID NO:272; a CDR2 comprising the amino acid sequence of SEQ ID NO:273; and a CDR3 comprising the amino acid sequence of SEQ ID NO:274; (ii) VH2 and VH4 comprise a CDR1 comprising the amino acid sequence of SEQ ID NO:280; a CDR2 comprising the amino acid sequence of SEQ ID NO:281; and a CDR3 comprising the amino acid sequence of SEQ ID NO:282; (iii) VL1 and VL3 comprise a CDR1 comprising the amino acid sequence of SEQ ID NO:268; a CDR2 comprising the amino acid sequence of SEQ ID NO:269 (having the sequence of GAS); and a CDR3 comprising the amino acid sequence of SEQ ID NO:270; and (iv) VL2 and VL4 comprise a CDR1 comprising the amino acid sequence of SEQ ID NO:276; a CDR2 comprising the amino acid sequence of SEQ ID NO:277 (having the sequence of LGS); and a CDR3 comprising the amino acid sequence of SEQ ID NO:278. In some aspects, L1-L16 comprise the amino acid sequence of any one of SEQ ID NOs:1-34, wherein SEQ ID NO:1 has the amino acid sequence of G, SEQ ID NO:2 has the amino acid sequence of A, SEQ ID NO:3 has the amino acid sequence of GSS and SEQ ID NO:4 has the amino acid sequence of ASG. In some aspects, L1 or L4 and L7 or L10 comprise the amino acid sequence of SEQ ID NO:6; L2 or L5 and L8 or L11 comprise the amino acid sequence of SEQ ID NO:27; and L3 or L6 and L9 or L12 comprise the amino acid sequence of SEQ ID NO:6. In some aspects, L1 or L5 and L9 or L13 comprise the amino acid sequence of SEQ ID NO:6; L2 or L6 and L10 or L14 comprise the amino acid sequence of SEQ ID NO:27; L3 or L7 and L11 or L15 comprise the amino acid sequence of SEQ ID NO:6; and L4 or L8 and L12 or L16 comprise the amino acid sequence of SEQ ID NO:12. In some aspects, Fc comprises a knob-into-hole modification or Fc effector function knockout mutation. In some aspects, Fc comprises an amino acid sequence having at least 80%, at least 85%, at least 90%, at least 91%, at least 92%, at least 93%, at least 94%, at least 95%, at least 96%, at least 97%, at least 98%, at least 99%, or 100% identity to SEQ ID NO:37. In some aspects, Fc comprises the amino acid sequence of SEQ ID NO:37. In some preferred aspects, CDR1, CDR2 and CDR3 of each of VH1, VH2, VH3, VH4, VL1, VL2, VL3 and VL4 have at least 90% identity with the corresponding amino acid sequences specified above, optionally with (i) an Fc having at least 90% identity with the corresponding amino acid sequence recited above; and/or (ii) one or more linker sequence as specified above. In some particularly preferred aspects, CDR1, CDR2 and CDR3 of each of VH1, VH2, VH3, VH4, VL1, VL2, VL3 and VL4 comprise or consist of the corresponding amino acid sequences specified above, optionally with (i) an Fc comprising or consisting of the corresponding amino acid sequence recited above; and/or (ii) one or more linker sequence as specified above.

[0647] In some aspects, (i) VH1 and VH4 comprise a CDR1 comprising an amino acid sequence having at least 80%, at least 85%, at least 90%, at least 91%, at least 92%, at least 93%, at least 94%, at least 95%, at least 96%, at least 97%, at least 98%, at least 99% or 100% identity to SEQ ID NO:272; a CDR2 comprising an amino acid sequence having at least 80%, at least 85%, at least 90%, at least 91%, at least 92%, at least 93%, at least 94%, at least 95%, at least 96%, at least 97%, at least 98%, at least 99% or 100% identity to SEQ ID NO:273; and a CDR3 comprising an amino acid sequence having at least 80%, at least 85%, at least 90%, at least 91%, at least 92%, at least 93%, at least 94%, at least 95%, at least 96%, at least 97%, at least 98%, at least 99% or 100% identity to SEQ ID NO:274; (ii) VH2 and VH3 comprise a CDR1 comprising an amino acid sequence having at least 80%, at least 85%, at least 90%, at least 91%, at least 92%, at least 93%, at least 94%, at least 95%, at least 96%, at least 97%, at least 98%, at least 99% or 100% identity to SEQ ID NO:59; a CDR2 comprising an amino acid sequence having at least 80%, at least 85%, at least 90%, at least 91%, at least 92%, at least 93%, at least 94%, at least 95%, at least 96%, at least 97%, at least 98%, at least 99% or 100% identity to SEQ ID NO:60; and a CDR3 comprising an amino acid sequence having at least 80%, at least 85%, at least 90%, at least 91%, at least 92%, at least 93%, at least 94%, at least 95%, at least 96%, at least 97%, at least 98%, at least 99% or 100% identity to SEQ ID NO:61; (iii) VL1 and VL4 comprise a CDR1 comprising an amino acid sequence having at least 80%, at least 85%, at least 90%, at least 91%, at least 92%, at least 93%, at least 94%, at least 95%, at least 96%, at least 97%, at least 98%, at least 99% or 100% identity to SEQ ID NO:268; a CDR2 comprising an amino acid sequence having at least 80%, at least 85%, at least 90%, at least 91%, at least 92%, at least 93%, at least 94%, at least 95%, at least 96%, at least 97%, at least 98%, at least 99% or 100% identity to SEQ ID NO:269 (having the sequence of GAS); and a CDR3 comprising an amino acid sequence having at least 80%, at least 85%, at least 90%, at least 91%, at least 92%, at least 93%, at least 94%, at least 95%, at least 96%, at least 97%, at least 98%, at least 99% or 100% identity to SEQ ID NO:270; and (iv) VL2 and VL3 comprise a CDR1 comprising an amino acid sequence having at least 80%, at least 85%, at least 90%, at least 91%, at least 92%, at least 93%, at least 94%, at least 95%, at least 96%, at least 97%, at least 98%, at least 99% or 100% identity to SEQ ID NO:55; a CDR2 comprising an amino acid sequence having at least 80%, at least 85%, at least 90%, at least 91%, at least 92%, at least 93%, at least 94%, at least 95%, at least 96%, at least 97%, at least 98%, at least 99% or 100% identity to SEQ ID NO:56 (having the sequence of GTN); and a CDR3 comprising an amino acid sequence having at least 80%, at least 85%, at least 90%, at least 91%, at least 92%, at least 93%, at least 94%, at least 95%, at least 96%, at least 97%, at least 98%, at least 99% or 100% identity to SEQ ID NO:57. In some aspects, (i) VH1 and VH4 comprise a CDR1 comprising the amino acid sequence of SEQ ID NO:272; a CDR2 comprising the amino acid sequence of SEQ ID NO:273; and a CDR3 comprising the amino acid sequence of SEQ ID NO:274; (ii) VH2 and VH3 comprise a CDR1 comprising the amino acid sequence of SEQ ID NO:59; a CDR2 comprising the amino acid sequence of SEQ ID NO:60; and a CDR3 comprising the amino acid sequence of SEQ ID NO:61; (iii) VL1 and VL4 comprise a CDR1 comprising the amino acid sequence of SEQ ID NO:268; a CDR2 comprising the amino acid sequence of SEQ ID NO:269 (having the sequence of GAS); and a CDR3 comprising the amino acid sequence of SEQ ID NO:270; and (iv) VL2 and VL3 comprise a CDR1 comprising the amino acid sequence of SEQ ID NO:55; a CDR2 comprising the amino acid sequence of SEQ ID NO:56 (having the sequence of GTN); and a CDR3 comprising the amino acid sequence of SEQ ID NO:57. In some aspects, L1-L16 comprise the amino acid sequence of any one of SEQ ID NOs:1-34, wherein SEQ ID NO:1 has the amino acid sequence of G, SEQ ID NO:2 has the amino acid sequence of A, SEQ ID NO:3 has the amino acid sequence of GSS and SEQ ID NO:4 has the amino acid sequence of ASG. In some aspects, L1 or L4 and L7 or L10 comprise the amino acid sequence of SEQ ID NO:6; L2 or L5 and L8 or L11 comprise the amino acid sequence of SEQ ID NO:27; and L3 or L6 and L9 or L12 comprise the amino acid sequence of SEQ ID NO:6. In some aspects, L1 or L5 and L9 or L13 comprise the amino acid sequence of SEQ ID NO:6; L2 or L6 and L10 or L14 comprise the amino acid sequence of SEQ ID NO:27; L3 or L7 and L11 or L15 comprise the amino acid sequence of SEQ ID NO:6; and L4 or L8 and L12 or L16 comprise the amino acid sequence of SEQ ID NO:12. In some aspects, Fc comprises a knob-into-hole modification or Fc effector function knockout mutation. In some aspects, Fc comprises an amino acid sequence having at least 80%, at least 85%, at least 90%, at least 91%, at least 92%, at least 93%, at least 94%, at least 95%, at least 96%, at least 97%, at least 98%, at least 99%, or 100% identity to SEQ ID NO:293 or 294. In some aspects, Fc comprises the amino acid sequence of SEQ ID NO:293 or 294. In some preferred aspects, CDR1, CDR2 and CDR3 of each of VH1, VH2, VH3, VH4, VL1, VL2, VL3 and VL4 have at least 90% identity with the corresponding amino acid sequences specified above, optionally with (i) an Fe having at least 90% identity with the corresponding amino acid sequence recited above; and/or (ii) one or more linker sequence as specified above. In some particularly preferred aspects, CDR1, CDR2 and CDR3 of each of VH1, VH2, VH3, VH4, VL1, VL2, VL3 and VL4 comprise or consist of the corresponding amino acid sequences specified above, optionally with (i) an Fc comprising or consisting of the corresponding amino acid sequence recited above; and/or (ii) one or more linker sequence as specified above.

[0648] In some aspects, (i) VH1 and VH4 comprise a CDR1 comprising an amino acid sequence having at least 80%, at least 85%, at least 90%, at least 91%, at least 92%, at least 93%, at least 94%, at least 95%, at least 96%, at least 97%, at least 98%, at least 99% or 100% identity to SEQ ID NO:272; a CDR2 comprising an amino acid sequence having at least 80%, at least 85%, at least 90%, at least 91%, at least 92%, at least 93%, at least 94%, at least 95%, at least 96%, at least 97%, at least 98%, at least 99% or 100% identity to SEQ ID NO:273; and a CDR3 comprising an amino acid sequence having at least 80%, at least 85%, at least 90%, at least 91%, at least 92%, at least 93%, at least 94%, at least 95%, at least 96%, at least 97%, at least 98%, at least 99% or 100% identity to SEQ ID NO:274; (ii) VH2 and VH3 comprise a CDR1 comprising an amino acid sequence having at least 80%, at least 85%, at least 90%, at least 91%, at least 92%, at least 93%, at least 94%, at least 95%, at least 96%, at least 97%, at least 98%, at least 99% or 100% identity to SEQ ID NO:280; a CDR2 comprising an amino acid sequence having at least 80%, at least 85%, at least 90%, at least 91%, at least 92%, at least 93%, at least 94%, at least 95%, at least 96%, at least 97%, at least 98%, at least 99% or 100% identity to SEQ ID NO:281; and a CDR3 comprising an amino acid sequence having at least 80%, at least 85%, at least 90%, at least 91%, at least 92%, at least 93%, at least 94%, at least 95%, at least 96%, at least 97%, at least 98%, at least 99% or 100% identity to SEQ ID NO:282; (iii) VL1 and VL4 comprise a CDR1 comprising an amino acid sequence having at least 80%, at least 85%, at least 90%, at least 91%, at least 92%, at least 93%, at least 94%, at least 95%, at least 96%, at least 97%, at least 98%, at least 99% or 100% identity to SEQ ID NO:268; a CDR2 comprising an amino acid sequence having at least 80%, at least 85%, at least 90%, at least 91%, at least 92%, at least 93%, at least 94%, at least 95%, at least 96%, at least 97%, at least 98%, at least 99% or 100% identity to SEQ ID NO:269 (having the sequence of GAS); and a CDR3 comprising an amino acid sequence having at least 80%, at least 85%, at least 90%, at least 91%, at least 92%, at least 93%, at least 94%, at least 95%, at least 96%, at least 97%, at least 98%, at least 99% or 100% identity to SEQ ID NO:270; and (iv) VL2 and VL3 comprise a CDR1 comprising an amino acid sequence having at least 80%, at least 85%, at least 90%, at least 91%, at least 92%, at least 93%, at least 94%, at least 95%, at least 96%, at least 97%, at least 98%, at least 99% or 100% identity to SEQ ID NO:276; a CDR2 comprising an amino acid sequence having at least 80%, at least 85%, at least 90%, at least 91%, at least 92%, at least 93%, at least 94%, at least 95%, at least 96%, at least 97%, at least 98%, at least 99% or 100% identity to SEQ ID NO:277 (having the sequence of LGS); and a CDR3 comprising an amino acid sequence having at least 80%, at least 85%, at least 90%, at least 91%, at least 92%, at least 93%, at least 94%, at least 95%, at least 96%, at least 97%, at least 98%, at least 99% or 100% identity to SEQ ID NO:278. In some aspects, (i) VH1 and VH4 comprise a CDR1 comprising the amino acid sequence of SEQ ID NO:272; a CDR2 comprising the amino acid sequence of SEQ ID NO:273; and a CDR3 comprising the amino acid sequence of SEQ ID NO:274; (ii) VH2 and VH3 comprise a CDR1 comprising the amino acid sequence of SEQ ID NO:280; a CDR2 comprising the amino acid sequence of SEQ ID NO:281; and a CDR3 comprising the amino acid sequence of SEQ ID NO:282; (iii) VL1 and VL4 comprise a CDR1 comprising the amino acid sequence of SEQ ID NO:268; a CDR2 comprising the amino acid sequence of SEQ ID NO:269 (having the sequence of GAS); and a CDR3 comprising the amino acid sequence of SEQ ID NO:270; and (iv) VL2 and VL3 comprise a CDR1 comprising the amino acid sequence of SEQ ID NO:276; a CDR2 comprising the amino acid sequence of SEQ ID NO:277 (having the sequence of LGS); and a CDR3 comprising the amino acid sequence of SEQ ID NO:278. In some aspects, L1-L16 comprise the amino acid sequence of any one of SEQ ID NOs:1-34, wherein SEQ ID NO:1 has the amino acid sequence of G, SEQ ID NO:2 has the amino acid sequence of A, SEQ ID NO:3 has the amino acid sequence of GSS and SEQ ID NO:4 has the amino acid sequence of ASG. In some aspects, L1 or L4 and L7 or L10 comprise the amino acid sequence of SEQ ID NO:6; L2 or L5 and L8 or L11 comprise the amino acid sequence of SEQ ID NO:27; and L3 or L6 and L9 or L12 comprise the amino acid sequence of SEQ ID NO:6. In some aspects, L1 or L5 and L9 or L13 comprise the amino acid sequence of SEQ ID NO:6; L2 or L6 and L10 or L14 comprise the amino acid sequence of SEQ ID NO:27; L3 or L7 and L11 or L15 comprise the amino acid sequence of SEQ ID NO:6; and L4 or L8 and L12 or L16 comprise the amino acid sequence of SEQ ID NO:12. In some aspects, Fc comprises a knob-into-hole modification or Fc effector function knockout mutation. In some aspects, Fc comprises an amino acid sequence having at least 80%, at least 85%, at least 90%, at least 91%, at least 92%, at least 93%, at least 94%, at least 95%, at least 96%, at least 97%, at least 98%, at least 99%, or 100% identity to SEQ ID NO:293 or 294. In some aspects, Fc comprises the amino acid sequence of SEQ ID NO:293 or 294. In some preferred aspects, CDR1, CDR2 and CDR3 of each of VH1, VH2, VH3, VH4, VL1, VL2, VL3 and VL4 have at least 90% identity with the corresponding amino acid sequences specified above, optionally with (i) an Fc having at least 90% identity with the corresponding amino acid sequence recited above; and/or (ii) one or more linker sequence as specified above. In some particularly preferred aspects, CDR1, CDR2 and CDR3 of each of VH1, VH2, VH3, VH4, VL1, VL2, VL3 and VL4 comprise or consist of the corresponding amino acid sequences specified above, optionally with (i) an Fc comprising or consisting of the corresponding amino acid sequence recited above; and/or (ii) one or more linker sequence as specified above.

[0649] In some aspects, (i) VH1 comprises a CDR1 comprising an amino acid sequence having at least 80%, at least 85%, at least 90%, at least 91%, at least 92%, at least 93%, at least 94%, at least 95%, at least 96%, at least 97%, at least 98%, at least 99% or 100% identity to SEQ ID NO:280; a CDR2 comprising an amino acid sequence having at least 80%, at least 85%, at least 90%, at least 91%, at least 92%, at least 93%, at least 94%, at least 95%, at least 96%, at least 97%, at least 98%, at least 99% or 100% identity to SEQ ID NO:281; and a CDR3 comprising an amino acid sequence having at least 80%, at least 85%, at least 90%, at least 91%, at least 92%, at least 93%, at least 94%, at least 95%, at least 96%, at least 97%, at least 98%, at least 99% or 100% identity to SEQ ID NO:282; (ii) VH2 and VH3 comprise a CDR1 comprising an amino acid sequence having at least 80%, at least 85%, at least 90%, at least 91%, at least 92%, at least 93%, at least 94%, at least 95%, at least 96%, at least 97%, at least 98%, at least 99% or 100% identity to SEQ ID NO:288; a CDR2 comprising an amino acid sequence having at least 80%, at least 85%, at least 90%, at least 91%, at least 92%, at least 93%, at least 94%, at least 95%, at least 96%, at least 97%, at least 98%, at least 99% or 100% identity to SEQ ID NO:289; and a CDR3 comprising an amino acid sequence having at least 80%, at least 85%, at least 90%, at least 91%, at least 92%, at least 93%, at least 94%, at least 95%, at least 96%, at least 97%, at least 98%, at least 99% or 100% identity to SEQ ID NO:290; (iii) VH4 comprises a CDR1 comprising an amino acid sequence having at least 80%, at least 85%, at least 90%, at least 91%, at least 92%, at least 93%, at least 94%, at least 95%, at least 96%, at least 97%, at least 98%, at least 99% or 100% identity to SEQ ID NO:59; a CDR2 comprising an amino acid sequence having at least 80%, at least 85%, at least 90%, at least 91%, at least 92%, at least 93%, at least 94%, at least 95%, at least 96%, at least 97%, at least 98%, at least 99% or 100% identity to SEQ ID NO:60; and a CDR3 comprising an amino acid sequence having at least 80%, at least 85%, at least 90%, at least 91%, at least 92%, at least 93%, at least 94%, at least 95%, at least 96%, at least 97%, at least 98%, at least 99% or 100% identity to SEQ ID NO:61; (iv) VL1 comprises a CDR1 comprising an amino acid sequence having at least 80%, at least 85%, at least 90%, at least 91%, at least 92%, at least 93%, at least 94%, at least 95%, at least 96%, at least 97%, at least 98%, at least 99% or 100% identity to SEQ ID NO:276; a CDR2 comprising an amino acid sequence having at least 80%, at least 85%, at least 90%, at least 91%, at least 92%, at least 93%, at least 94%, at least 95%, at least 96%, at least 97%, at least 98%, at least 99% or 100% identity to SEQ ID NO:277 (having the sequence of LGS); and a CDR3 comprising an amino acid sequence having at least 80%, at least 85%, at least 90%, at least 91%, at least 92%, at least 93%, at least 94%, at least 95%, at least 96%, at least 97%, at least 98%, at least 99% or 100% identity to SEQ ID NO:278; (v) VL2 and VL3 comprise a CDR1 comprising an amino acid sequence having at least 80%, at least 85%, at least 90%, at least 91%, at least 92%, at least 93%, at least 94%, at least 95%, at least 96%, at least 97%, at least 98%, at least 99% or 100% identity to SEQ ID NO:284; a CDR2 comprising an amino acid sequence having at least 80%, at least 85%, at least 90%, at least 91%, at least 92%, at least 93%, at least 94%, at least 95%, at least 96%, at least 97%, at least 98%, at least 99% or 100% identity to SEQ ID NO:285; and a CDR3 comprising an amino acid sequence having at least 80%, at least 85%, at least 90%, at least 91%, at least 92%, at least 93%, at least 94%, at least 95%, at least 96%, at least 97%, at least 98%, at least 99% or 100% identity to SEQ ID NO:286; and (vi) VL4 comprises a CDR1 comprising an amino acid sequence having at least 80%, at least 85%, at least 90%, at least 91%, at least 92%, at least 93%, at least 94%, at least 95%, at least 96%, at least 97%, at least 98%, at least 99% or 100% identity to SEQ ID NO:55; a CDR2 comprising an amino acid sequence having at least 80%, at least 85%, at least 90%, at least 91%, at least 92%, at least 93%, at least 94%, at least 95%, at least 96%, at least 97%, at least 98%, at least 99% or 100% identity to SEQ ID NO:56 (having the sequence of GTN); and a CDR3 comprising an amino acid sequence having at least 80%, at least 85%, at least 90%, at least 91%, at least 92%, at least 93%, at least 94%, at least 95%, at least 96%, at least 97%, at least 98%, at least 99% or 100% identity to SEQ ID NO:57. In some aspects, (i) VH1 comprises a CDR1 comprising the amino acid sequence of SEQ ID NO:280; a CDR2 comprising the amino acid sequence of SEQ ID NO:281; and a CDR3 comprising the amino acid sequence of SEQ ID NO:282; (ii) VH2 and VH3 comprise a CDR1 comprising the amino acid sequence of SEQ ID NO:288; a CDR2 comprising the amino acid sequence of SEQ ID NO:289; and a CDR3 comprising the amino acid sequence of SEQ ID NO:290; (iii) VH4 comprises a CDR1 comprising the amino acid sequence of SEQ ID NO:59; a CDR2 comprising the amino acid sequence of SEQ ID NO:60; and a CDR3 comprising the amino acid sequence of SEQ ID NO:61; (iv) VL1 comprises a CDR1 comprising the amino acid sequence of SEQ ID NO:276; a CDR2 comprising the amino acid sequence of SEQ ID NO:277 (having the sequence of LGS); and a CDR3 comprising the amino acid sequence of SEQ ID NO:278; (v) VL2 and VL3 comprise a CDR1 comprising the amino acid sequence of SEQ ID NO:284; a CDR2 comprising the amino acid sequence of SEQ ID NO:285; and a CDR3 comprising the amino acid sequence of SEQ ID NO:286; and (vi) VL4 comprises a CDR1 comprising the amino acid sequence of SEQ ID NO:55; a CDR2 comprising the amino acid sequence of SEQ ID NO:56 (having the sequence of GTN); and a CDR3 comprising the amino acid sequence of SEQ ID NO:57. In some aspects, L1-L16 comprise the amino acid sequence of any one of SEQ ID NOs:1-34, wherein SEQ ID NO:1 has the amino acid sequence of G, SEQ ID NO:2 has the amino acid sequence of A, SEQ ID NO:3 has the amino acid sequence of GSS and SEQ ID NO:4 has the amino acid sequence of ASG. In some aspects, L1 or L4 and L7 or L10 comprise the amino acid sequence of SEQ ID NO:6; L2 or L5 and L8 or L11 comprise the amino acid sequence of SEQ ID NO:27; and L3 or L6 and L9 or L12 comprise the amino acid sequence of SEQ ID NO:6. In some aspects, L1 or L5 and L9 or L13 comprise the amino acid sequence of SEQ ID NO:6; L2 or L6 and L10 or L14 comprise the amino acid sequence of SEQ ID NO:27; L3 or L7 and L11 or L15 comprise the amino acid sequence of SEQ ID NO:6; and L4 or L8 and L12 or L16 comprise the amino acid sequence of SEQ ID NO:12. In some aspects, Fc comprises a knob-into-hole modification or Fc effector function knockout mutation. In some aspects, Fc comprises an amino acid sequence having at least 80%, at least 85%, at least 90%, at least 91%, at least 92%, at least 93%, at least 94%, at least 95%, at least 96%, at least 97%, at least 98%, at least 99%, or 100% identity to SEQ ID NO:37. In some aspects, Fc comprises the amino acid sequence of SEQ ID NO:37. In some preferred aspects, CDR1, CDR2 and CDR3 of each of VH1, VH2, VH3, VH4, VL1, VL2, VL3 and VL4 have at least 90% identity with the corresponding amino acid sequences specified above, optionally with (i) an Fc having at least 90% identity with the corresponding amino acid sequence recited above; and/or (ii) one or more linker sequence as specified above. In some particularly preferred aspects, CDR1, CDR2 and CDR3 of each of VH1, VH2, VH3, VH4, VL1, VL2, VL3 and VL4 comprise or consist of the corresponding amino acid sequences specified above, optionally with (i) an Fc comprising or consisting of the corresponding amino acid sequence recited above; and/or (ii) one or more linker sequence as specified above.

[0650] In some aspects, (i) VH1 and VH3 comprise a CDR1 comprising an amino acid sequence having at least 80%, at least 85%, at least 90%, at least 91%, at least 92%, at least 93%, at least 94%, at least 95%, at least 96%, at least 97%, at least 98%, at least 99% or 100% identity to SEQ ID NO:288; a CDR2 comprising an amino acid sequence having at least 80%, at least 85%, at least 90%, at least 91%, at least 92%, at least 93%, at least 94%, at least 95%, at least 96%, at least 97%, at least 98%, at least 99% or 100% identity to SEQ ID NO:289; and a CDR3 comprising an amino acid sequence having at least 80%, at least 85%, at least 90%, at least 91%, at least 92%, at least 93%, at least 94%, at least 95%, at least 96%, at least 97%, at least 98%, at least 99% or 100% identity to SEQ ID NO:290; (ii) VH2 and VH4 comprise a CDR1 comprising an amino acid sequence having at least 80%, at least 85%, at least 90%, at least 91%, at least 92%, at least 93%, at least 94%, at least 95%, at least 96%, at least 97%, at least 98%, at least 99% or 100% identity to SEQ ID NO:280; a CDR2 comprising an amino acid sequence having at least 80%, at least 85%, at least 90%, at least 91%, at least 92%, at least 93%, at least 94%, at least 95%, at least 96%, at least 97%, at least 98%, at least 99% or 100% identity to SEQ ID NO:281; and a CDR3 comprising an amino acid sequence having at least 80%, at least 85%, at least 90%, at least 91%, at least 92%, at least 93%, at least 94%, at least 95%, at least 96%, at least 97%, at least 98%, at least 99% or 100% identity to SEQ ID NO:282; (iii) VL1 and VL3 comprise a CDR1 comprising an amino acid sequence having at least 80%, at least 85%, at least 90%, at least 91%, at least 92%, at least 93%, at least 94%, at least 95%, at least 96%, at least 97%, at least 98%, at least 99% or 100% identity to SEQ ID NO:284; a CDR2 comprising an amino acid sequence having at least 80%, at least 85%, at least 90%, at least 91%, at least 92%, at least 93%, at least 94%, at least 95%, at least 96%, at least 97%, at least 98%, at least 99% or 100% identity to SEQ ID NO:285; and a CDR3 comprising an amino acid sequence having at least 80%, at least 85%, at least 90%, at least 91%, at least 92%, at least 93%, at least 94%, at least 95%, at least 96%, at least 97%, at least 98%, at least 99% or 100% identity to SEQ ID NO:286; and (iv) VL2 and VL4 comprise a CDR1 comprising an amino acid sequence having at least 80%, at least 85%, at least 90%, at least 91%, at least 92%, at least 93%, at least 94%, at least 95%, at least 96%, at least 97%, at least 98%, at least 99% or 100% identity to SEQ ID NO:276; a CDR2 comprising an amino acid sequence having at least 80%, at least 85%, at least 90%, at least 91%, at least 92%, at least 93%, at least 94%, at least 95%, at least 96%, at least 97%, at least 98%, at least 99% or 100% identity to SEQ ID NO:277 (having the sequence of LGS); and a CDR3 comprising an amino acid sequence having at least 80%, at least 85%, at least 90%, at least 91%, at least 92%, at least 93%, at least 94%, at least 95%, at least 96%, at least 97%, at least 98%, at least 99% or 100% identity to SEQ ID NO:278. In some aspects, (i) VH1 and VH3 comprise a CDR1 comprising the amino acid sequence of SEQ ID NO:288; a CDR2 comprising the amino acid sequence of SEQ ID NO:289; and a CDR3 comprising the amino acid sequence of SEQ ID NO:290; (ii) VH2 and VH4 comprise a CDR1 comprising the amino acid sequence of SEQ ID NO:280; a CDR2 comprising the amino acid sequence of SEQ ID NO:281; and a CDR3 comprising the amino acid sequence of SEQ ID NO:282; (iii) VL1 and VL3 comprise a CDR1 comprising the amino acid sequence of SEQ ID NO:284; a CDR2 comprising the amino acid sequence of SEQ ID NO:285; and a CDR3 comprising the amino acid sequence of SEQ ID NO:286; and (iv) VL2 and VL4 comprise a CDR1 comprising the amino acid sequence of SEQ ID NO:276; a CDR2 comprising the amino acid sequence of SEQ ID NO:277 (having the sequence of LGS); and a CDR3 comprising the amino acid sequence of SEQ ID NO:278. In some aspects, L1-L16 comprise the amino acid sequence of any one of SEQ ID NOs:1-34, wherein SEQ ID NO:1 has the amino acid sequence of G, SEQ ID NO:2 has the amino acid sequence of A, SEQ ID NO:3 has the amino acid sequence of GSS and SEQ ID NO:4 has the amino acid sequence of ASG. In some aspects, L1 or L4 and L7 or L10 comprise the amino acid sequence of SEQ ID NO:6; L2 or L5 and L8 or L11 comprise the amino acid sequence of SEQ ID NO:27; and L3 or L6 and L9 or L12 comprise the amino acid sequence of SEQ ID NO:6. In some aspects, L1 or L5 and L9 or L13 comprise the amino acid sequence of SEQ ID NO:6; L2 or L6 and L10 or L14 comprise the amino acid sequence of SEQ ID NO:27; L3 or L7 and L11 or L15 comprise the amino acid sequence of SEQ ID NO:6; and L4 or L8 and L12 or L16 comprise the amino acid sequence of SEQ ID NO:12. In some aspects, Fc comprises a knob-into-hole modification or Fc effector function knockout mutation. In some aspects, Fc comprises an amino acid sequence having at least 80%, at least 85%, at least 90%, at least 91%, at least 92%, at least 93%, at least 94%, at least 95%, at least 96%, at least 97%, at least 98%, at least 99%, or 100% identity to SEQ ID NO:37. In some aspects, Fc comprises the amino acid sequence of SEQ ID NO:37. In some preferred aspects, CDR1, CDR2 and CDR3 of each of VH1, VH2, VH3, VH4, VL1, VL2, VL3 and VL4 have at least 90% identity with the corresponding amino acid sequences specified above, optionally with (i) an Fc having at least 90% identity with the corresponding amino acid sequence recited above; and/or (ii) one or more linker sequence as specified above. In some particularly preferred aspects, CDR1, CDR2 and CDR3 of each of VH1, VH2, VH3, VH4, VL1, VL2, VL3 and VL4 comprise or consist of the corresponding amino acid sequences specified above, optionally with (i) an Fc comprising or consisting of the corresponding amino acid sequence recited above; and/or (ii) one or more linker sequence as specified above.

[0651] In some aspects, (i) VH1 and VH3 comprise a CDR1 comprising an amino acid sequence having at least 80%, at least 85%, at least 90%, at least 91%, at least 92%, at least 93%, at least 94%, at least 95%, at least 96%, at least 97%, at least 98%, at least 99% or 100% identity to SEQ ID NO:280; a CDR2 comprising an amino acid sequence having at least 80%, at least 85%, at least 90%, at least 91%, at least 92%, at least 93%, at least 94%, at least 95%, at least 96%, at least 97%, at least 98%, at least 99% or 100% identity to SEQ ID NO:281; and a CDR3 comprising an amino acid sequence having at least 80%, at least 85%, at least 90%, at least 91%, at least 92%, at least 93%, at least 94%, at least 95%, at least 96%, at least 97%, at least 98%, at least 99% or 100% identity to SEQ ID NO:282; (ii) VH2 and VH4 comprise a CDR1 comprising an amino acid sequence having at least 80%, at least 85%, at least 90%, at least 91%, at least 92%, at least 93%, at least 94%, at least 95%, at least 96%, at least 97%, at least 98%, at least 99% or 100% identity to SEQ ID NO:288; a CDR2 comprising an amino acid sequence having at least 80%, at least 85%, at least 90%, at least 91%, at least 92%, at least 93%, at least 94%, at least 95%, at least 96%, at least 97%, at least 98%, at least 99% or 100% identity to SEQ ID NO:289; and a CDR3 comprising an amino acid sequence having at least 80%, at least 85%, at least 90%, at least 91%, at least 92%, at least 93%, at least 94%, at least 95%, at least 96%, at least 97%, at least 98%, at least 99% or 100% identity to SEQ ID NO:290; (iii) VL1 and VL3 comprise a CDR1 comprising an amino acid sequence having at least 80%, at least 85%, at least 90%, at least 91%, at least 92%, at least 93%, at least 94%, at least 95%, at least 96%, at least 97%, at least 98%, at least 99% or 100% identity to SEQ ID NO:276; a CDR2 comprising an amino acid sequence having at least 80%, at least 85%, at least 90%, at least 91%, at least 92%, at least 93%, at least 94%, at least 95%, at least 96%, at least 97%, at least 98%, at least 99% or 100% identity to SEQ ID NO:277 (having the sequence of LGS); and a CDR3 comprising an amino acid sequence having at least 80%, at least 85%, at least 90%, at least 91%, at least 92%, at least 93%, at least 94%, at least 95%, at least 96%, at least 97%, at least 98%, at least 99% or 100% identity to SEQ ID NO:278; and (iv) VL2 and VL4 comprise a CDR1 comprising an amino acid sequence having at least 80%, at least 85%, at least 90%, at least 91%, at least 92%, at least 93%, at least 94%, at least 95%, at least 96%, at least 97%, at least 98%, at least 99% or 100% identity to SEQ ID NO:284; a CDR2 comprising an amino acid sequence having at least 80%, at least 85%, at least 90%, at least 91%, at least 92%, at least 93%, at least 94%, at least 95%, at least 96%, at least 97%, at least 98%, at least 99% or 100% identity to SEQ ID NO:285; and a CDR3 comprising an amino acid sequence having at least 80%, at least 85%, at least 90%, at least 91%, at least 92%, at least 93%, at least 94%, at least 95%, at least 96%, at least 97%, at least 98%, at least 99% or 100% identity to SEQ ID NO:286. In some aspects, (i) VH1 and VH3 comprise a CDR1 comprising the amino acid sequence of SEQ ID NO:280; a CDR2 comprising the amino acid sequence of SEQ ID NO:281; and a CDR3 comprising the amino acid sequence of SEQ ID NO:282; (ii) VH2 and VH4 comprise a CDR1 comprising the amino acid sequence of SEQ ID NO:288; a CDR2 comprising the amino acid sequence of SEQ ID NO:289; and a CDR3 comprising the amino acid sequence of SEQ ID NO:290; (iii) VL1 and VL3 comprise a CDR1 comprising the amino acid sequence of SEQ ID NO:276; a CDR2 comprising the amino acid sequence of SEQ ID NO:277 (having the sequence of LGS); and a CDR3 comprising the amino acid sequence of SEQ ID NO:278; and (iv) VL2 and VL4 comprise a CDR1 comprising the amino acid sequence of SEQ ID NO:284; a CDR2 comprising the amino acid sequence of SEQ ID NO:285; and a CDR3 comprising the amino acid sequence of SEQ ID NO:286. In some aspects, L1-L16 comprise the amino acid sequence of any one of SEQ ID NOs:1-34, wherein SEQ ID NO:1 has the amino acid sequence of G, SEQ ID NO:2 has the amino acid sequence of A, SEQ ID NO:3 has the amino acid sequence of GSS and SEQ ID NO:4 has the amino acid sequence of ASG. In some aspects, L1 or L4 and L7 or L10 comprise the amino acid sequence of SEQ ID NO:6; L2 or L5 and L8 or L11 comprise the amino acid sequence of SEQ ID NO:27; and L3 or L6 and L9 or L12 comprise the amino acid sequence of SEQ ID NO:6. In some aspects, L1 or L5 and L9 or L13 comprise the amino acid sequence of SEQ ID NO:6; L2 or L6 and L10 or L14 comprise the amino acid sequence of SEQ ID NO:27; L3 or L7 and L11 or L15 comprise the amino acid sequence of SEQ ID NO:6; and L4 or L8 and L12 or L16 comprise the amino acid sequence of SEQ ID NO:12. In some aspects, Fc comprises a knob-into-hole modification or Fc effector function knockout mutation. In some aspects, Fc comprises an amino acid sequence having at least 80%, at least 85%, at least 90%, at least 91%, at least 92%, at least 93%, at least 94%, at least 95%, at least 96%, at least 97%, at least 98%, at least 99%, or 100% identity to SEQ ID NO:293 or 294. In some aspects, Fc comprises the amino acid sequence of SEQ ID NO:293 or 294. In some preferred aspects, CDR1, CDR2 and CDR3 of each of VH1, VH2, VH3, VH4, VL1, VL2, VL3 and VL4 have at least 90% identity with the corresponding amino acid sequences specified above, optionally with (i) an Fc having at least 90% identity with the corresponding amino acid sequence recited above; and/or (ii) one or more linker sequence as specified above. In some particularly preferred aspects, CDR1, CDR2 and CDR3 of each of VH1, VH2, VH3, VH4, VL1, VL2, VL3 and VL4 comprise or consist of the corresponding amino acid sequences specified above, optionally with (i) an Fc comprising or consisting of the corresponding amino acid sequence recited above; and/or (ii) one or more linker sequence as specified above.

[0652] In some aspects, (i) VH1 comprises a CDR1 comprising an amino acid sequence having at least 80%, at least 85%, at least 90%, at least 91%, at least 92%, at least 93%, at least 94%, at least 95%, at least 96%, at least 97%, at least 98%, at least 99% or 100% identity to SEQ ID NO:59; a CDR2 comprising an amino acid sequence having at least 80%, at least 85%, at least 90%, at least 91%, at least 92%, at least 93%, at least 94%, at least 95%, at least 96%, at least 97%, at least 98%, at least 99% or 100% identity to SEQ ID NO:60; and a CDR3 comprising an amino acid sequence having at least 80%, at least 85%, at least 90%, at least 91%, at least 92%, at least 93%, at least 94%, at least 95%, at least 96%, at least 97%, at least 98%, at least 99% or 100% identity to SEQ ID NO:61; (ii) VH2 and VH3 comprise a CDR1 comprising an amino acid sequence having at least 80%, at least 85%, at least 90%, at least 91%, at least 92%, at least 93%, at least 94%, at least 95%, at least 96%, at least 97%, at least 98%, at least 99% or 100% identity to SEQ ID NO:264; a CDR2 comprising an amino acid sequence having at least 80%, at least 85%, at least 90%, at least 91%, at least 92%, at least 93%, at least 94%, at least 95%, at least 96%, at least 97%, at least 98%, at least 99% or 100% identity to SEQ ID NO:265; and a CDR3 comprising an amino acid sequence having at least 80%, at least 85%, at least 90%, at least 91%, at least 92%, at least 93%, at least 94%, at least 95%, at least 96%, at least 97%, at least 98%, at least 99% or 100% identity to SEQ ID NO:266; (iii) VH4 comprises a CDR1 comprising an amino acid sequence having at least 80%, at least 85%, at least 90%, at least 91%, at least 92%, at least 93%, at least 94%, at least 95%, at least 96%, at least 97%, at least 98%, at least 99% or 100% identity to SEQ ID NO:280; a CDR2 comprising an amino acid sequence having at least 80%, at least 85%, at least 90%, at least 91%, at least 92%, at least 93%, at least 94%, at least 95%, at least 96%, at least 97%, at least 98%, at least 99% or 100% identity to SEQ ID NO:281; and a CDR3 comprising an amino acid sequence having at least 80%, at least 85%, at least 90%, at least 91%, at least 92%, at least 93%, at least 94%, at least 95%, at least 96%, at least 97%, at least 98%, at least 99% or 100% identity to SEQ ID NO:282; (iv) VL1 comprises a CDR1 comprising an amino acid sequence having at least 80%, at least 85%, at least 90%, at least 91%, at least 92%, at least 93%, at least 94%, at least 95%, at least 96%, at least 97%, at least 98%, at least 99% or 100% identity to SEQ ID NO:55; a CDR2 comprising an amino acid sequence having at least 80%, at least 85%, at least 90%, at least 91%, at least 92%, at least 93%, at least 94%, at least 95%, at least 96%, at least 97%, at least 98%, at least 99% or 100% identity to SEQ ID NO:56 (having the sequence of GTN); and a CDR3 comprising an amino acid sequence having at least 80%, at least 85%, at least 90%, at least 91%, at least 92%, at least 93%, at least 94%, at least 95%, at least 96%, at least 97%, at least 98%, at least 99% or 100% identity to SEQ ID NO:57; (v) VL2 and VL3 comprise a CDR1 comprising an amino acid sequence having at least 80%, at least 85%, at least 90%, at least 91%, at least 92%, at least 93%, at least 94%, at least 95%, at least 96%, at least 97%, at least 98%, at least 99% or 100% identity to SEQ ID NO:260; a CDR2 comprising an amino acid sequence having at least 80%, at least 85%, at least 90%, at least 91%, at least 92%, at least 93%, at least 94%, at least 95%, at least 96%, at least 97%, at least 98%, at least 99% or 100% identity to SEQ ID NO:261; and a CDR3 comprising an amino acid sequence having at least 80%, at least 85%, at least 90%, at least 91%, at least 92%, at least 93%, at least 94%, at least 95%, at least 96%, at least 97%, at least 98%, at least 99% or 100% identity to SEQ ID NO:262; and (vi) VL4 comprises a CDR1 comprising an amino acid sequence having at least 80%, at least 85%, at least 90%, at least 91%, at least 92%, at least 93%, at least 94%, at least 95%, at least 96%, at least 97%, at least 98%, at least 99% or 100% identity to SEQ ID NO:276; a CDR2 comprising an amino acid sequence having at least 80%, at least 85%, at least 90%, at least 91%, at least 92%, at least 93%, at least 94%, at least 95%, at least 96%, at least 97%, at least 98%, at least 99% or 100% identity to SEQ ID NO:277 (having the sequence of LGS); and a CDR3 comprising an amino acid sequence having at least 80%, at least 85%, at least 90%, at least 91%, at least 92%, at least 93%, at least 94%, at least 95%, at least 96%, at least 97%, at least 98%, at least 99% or 100% identity to SEQ ID NO:278. In some aspects, (i) VH1 comprises a CDR1 comprising the amino acid sequence of SEQ ID NO:59; a CDR2 comprising the amino acid sequence of SEQ ID NO:60; and a CDR3 comprising the amino acid sequence of SEQ ID NO:61; (ii) VH2 and VH3 comprise a CDR1 comprising the amino acid sequence of SEQ ID NO:264; a CDR2 comprising the amino acid sequence of SEQ ID NO:265; and a CDR3 comprising the amino acid sequence of SEQ ID NO:266; (iii) VH4 comprises a CDR1 comprising the amino acid sequence of SEQ ID NO:280; a CDR2 comprising the amino acid sequence of SEQ ID NO:281; and a CDR3 comprising the amino acid sequence of SEQ ID NO:282; (iv) VL1 comprises a CDR1 comprising the amino acid sequence of SEQ ID NO:55; a CDR2 comprising the amino acid sequence of SEQ ID NO:56 (having the sequence of GTN); and a CDR3 comprising the amino acid sequence of SEQ ID NO:57; (v) VL2 and VL3 comprise a CDR1 comprising the amino acid sequence of SEQ ID NO:260; a CDR2 comprising the amino acid sequence of SEQ ID NO:261; and a CDR3 comprising the amino acid sequence of SEQ ID NO:262; and (vi) VL4 comprises a CDR1 comprising the amino acid sequence of SEQ ID NO:276; a CDR2 comprising the amino acid sequence of SEQ ID NO:277 (having the sequence of LGS); and a CDR3 comprising the amino acid sequence of SEQ ID NO:278. In some aspects, L1 or L4 and L7 or L10 comprise the amino acid sequence of SEQ ID NO:6; L2 or L5 and L8 or L11 comprise the amino acid sequence of SEQ ID NO: 27; and L3 or L6 and L9 or L12 comprise the amino acid sequence of SEQ ID NO:6. In some aspects, L1 or L5 and L9 or L13 comprise the amino acid sequence of SEQ ID NO:6; L2 or L6 and L10 or L14 comprise the amino acid sequence of SEQ ID NO:27; L3 or L7 and L11 or L15 comprise the amino acid sequence of SEQ ID NO:6; and L4 or L8 and L12 or L16 comprise the amino acid sequence of SEQ ID NO:12. In some aspects, Fc comprises a knob-into-hole modification or Fc effector function knockout mutation. In some aspects, Fc comprises an amino acid sequence having at least 80%, at least 85%, at least 90%, at least 91%, at least 92%, at least 93%, at least 94%, at least 95%, at least 96%, at least 97%, at least 98%, at least 99%, or 100% identity to SEQ ID NO:293 or 294. In some aspects, Fc comprises the amino acid sequence of SEQ ID NO:293 or 294. In some preferred aspects, CDR1, CDR2 and CDR3 of each of VH1, VH2, VH3, VH4, VL1, VL2, VL3 and VL4 have at least 90% identity with the corresponding amino acid sequences specified above, optionally with (i) an Fc having at least 90% identity with the corresponding amino acid sequence recited above; and/or (ii) one or more linker sequence as specified above. In some particularly preferred aspects, CDR1, CDR2 and CDR3 of each of VH1, VH2, VH3, VH4, VL1, VL2, VL3 and VL4 comprise or consist of the corresponding amino acid sequences specified above, optionally with (i) an Fc comprising or consisting of the corresponding amino acid sequence recited above; and/or (ii) one or more linker sequence as specified above.

[0653] In some aspects, (i) VH1 comprises a CDR1 comprising an amino acid sequence having at least 80%, at least 85%, at least 90%, at least 91%, at least 92%, at least 93%, at least 94%, at least 95%, at least 96%, at least 97%, at least 98%, at least 99% or 100% identity to SEQ ID NO:59; a CDR2 comprising an amino acid sequence having at least 80%, at least 85%, at least 90%, at least 91%, at least 92%, at least 93%, at least 94%, at least 95%, at least 96%, at least 97%, at least 98%, at least 99% or 100% identity to SEQ ID NO:60; and a CDR3 comprising an amino acid sequence having at least 80%, at least 85%, at least 90%, at least 91%, at least 92%, at least 93%, at least 94%, at least 95%, at least 96%, at least 97%, at least 98%, at least 99% or 100% identity to SEQ ID NO:61; (ii) VH2 and VH4 comprise a CDR1 comprising an amino acid sequence having at least 80%, at least 85%, at least 90%, at least 91%, at least 92%, at least 93%, at least 94%, at least 95%, at least 96%, at least 97%, at least 98%, at least 99% or 100% identity to SEQ ID NO:264; a CDR2 comprising an amino acid sequence having at least 80%, at least 85%, at least 90%, at least 91%, at least 92%, at least 93%, at least 94%, at least 95%, at least 96%, at least 97%, at least 98%, at least 99% or 100% identity to SEQ ID NO:265; and a CDR3 comprising an amino acid sequence having at least 80%, at least 85%, at least 90%, at least 91%, at least 92%, at least 93%, at least 94%, at least 95%, at least 96%, at least 97%, at least 98%, at least 99% or 100% identity to SEQ ID NO:266; (iii) VH3 comprises a CDR1 comprising an amino acid sequence having at least 80%, at least 85%, at least 90%, at least 91%, at least 92%, at least 93%, at least 94%, at least 95%, at least 96%, at least 97%, at least 98%, at least 99% or 100% identity to SEQ ID NO:280; a CDR2 comprising an amino acid sequence having at least 80%, at least 85%, at least 90%, at least 91%, at least 92%, at least 93%, at least 94%, at least 95%, at least 96%, at least 97%, at least 98%, at least 99% or 100% identity to SEQ ID NO:281; and a CDR3 comprising an amino acid sequence having at least 80%, at least 85%, at least 90%, at least 91%, at least 92%, at least 93%, at least 94%, at least 95%, at least 96%, at least 97%, at least 98%, at least 99% or 100% identity to SEQ ID NO:282; (iv) VL1 comprises a CDR1 comprising an amino acid sequence having at least 80%, at least 85%, at least 90%, at least 91%, at least 92%, at least 93%, at least 94%, at least 95%, at least 96%, at least 97%, at least 98%, at least 99% or 100% identity to SEQ ID NO:55; a CDR2 comprising an amino acid sequence having at least 80%, at least 85%, at least 90%, at least 91%, at least 92%, at least 93%, at least 94%, at least 95%, at least 96%, at least 97%, at least 98%, at least 99% or 100% identity to SEQ ID NO:56 (having the sequence of GTN); and a CDR3 comprising an amino acid sequence having at least 80%, at least 85%, at least 90%, at least 91%, at least 92%, at least 93%, at least 94%, at least 95%, at least 96%, at least 97%, at least 98%, at least 99% or 100% identity to SEQ ID NO:57; (v) VL2 and VL4 comprise a CDR1 comprising an amino acid sequence having at least 80%, at least 85%, at least 90%, at least 91%, at least 92%, at least 93%, at least 94%, at least 95%, at least 96%, at least 97%, at least 98%, at least 99% or 100% identity to SEQ ID NO:260; a CDR2 comprising an amino acid sequence having at least 80%, at least 85%, at least 90%, at least 91%, at least 92%, at least 93%, at least 94%, at least 95%, at least 96%, at least 97%, at least 98%, at least 99% or 100% identity to SEQ ID NO:261; and a CDR3 comprising an amino acid sequence having at least 80%, at least 85%, at least 90%, at least 91%, at least 92%, at least 93%, at least 94%, at least 95%, at least 96%, at least 97%, at least 98%, at least 99% or 100% identity to SEQ ID NO:262; and (vi) VL3 comprises a CDR1 comprising an amino acid sequence having at least 80%, at least 85%, at least 90%, at least 91%, at least 92%, at least 93%, at least 94%, at least 95%, at least 96%, at least 97%, at least 98%, at least 99% or 100% identity to SEQ ID NO:276; a CDR2 comprising an amino acid sequence having at least 80%, at least 85%, at least 90%, at least 91%, at least 92%, at least 93%, at least 94%, at least 95%, at least 96%, at least 97%, at least 98%, at least 99% or 100% identity to SEQ ID NO:277 (having the sequence of LGS); and a CDR3 comprising an amino acid sequence having at least 80%, at least 85%, at least 90%, at least 91%, at least 92%, at least 93%, at least 94%, at least 95%, at least 96%, at least 97%, at least 98%, at least 99% or 100% identity to SEQ ID NO:278. In some aspects, (i) VH1 comprises a CDR1 comprising the amino acid sequence of SEQ ID NO:59; a CDR2 comprising the amino acid sequence of SEQ ID NO:60; and a CDR3 comprising the amino acid sequence of SEQ ID NO:61; (ii) VH2 and VH4 comprise a CDR1 comprising the amino acid sequence of SEQ ID NO:264; a CDR2 comprising the amino acid sequence of SEQ ID NO:265; and a CDR3 comprising the amino acid sequence of SEQ ID NO:266; (iii) VH3 comprises a CDR1 comprising the amino acid sequence of SEQ ID NO:280; a CDR2 comprising the amino acid sequence of SEQ ID NO:281; and a CDR3 comprising the amino acid sequence of SEQ ID NO:282; (iv) VL1 comprises a CDR1 comprising the amino acid sequence of SEQ ID NO:55; a CDR2 comprising the amino acid sequence of SEQ ID NO:56 (having the sequence of GTN); and a CDR3 comprising the amino acid sequence of SEQ ID NO:57; (v) VL2 and VL4 comprise a CDR1 comprising the amino acid sequence of SEQ ID NO:260; a CDR2 comprising the amino acid sequence of SEQ ID NO:261; and a CDR3 comprising the amino acid sequence of SEQ ID NO:262; and (vi) VL3 comprises a CDR1 comprising the amino acid sequence of SEQ ID NO:276; a CDR2 comprising the amino acid sequence of SEQ ID NO:277 (having the sequence of LGS); and a CDR3 comprising the amino acid sequence of SEQ ID NO:278. In some aspects, L1-L16 comprise the amino acid sequence of any one of SEQ ID NOs:1-34, wherein SEQ ID NO:1 has the amino acid sequence of G, SEQ ID NO:2 has the amino acid sequence of A, SEQ ID NO:3 has the amino acid sequence of GSS and SEQ ID NO:4 has the amino acid sequence of ASG. In some aspects, L1 or L4 and L7 or L10 comprise the amino acid sequence of SEQ ID NO:6; L2 or L5 and L8 or L11 comprise the amino acid sequence of SEQ ID NO:27; and L3 or L6 and L9 or L12 comprise the amino acid sequence of SEQ ID NO:6. In some aspects, L1 or L5 and L9 or L13 comprise the amino acid sequence of SEQ ID NO:6; L2 or L6 and L10 or L14 comprise the amino acid sequence of SEQ ID NO:27; L3 or L7 and L11 or L15 comprise the amino acid sequence of SEQ ID NO:6; and L4 or L8 and L12 or L16 comprise the amino acid sequence of SEQ ID NO:12. In some aspects, Fc comprises a knob-into-hole modification or Fc effector function knockout mutation. In some aspects, Fc comprises an amino acid sequence having at least 80%, at least 85%, at least 90%, at least 91%, at least 92%, at least 93%, at least 94%, at least 95%, at least 96%, at least 97%, at least 98%, at least 99%, or 100% identity to SEQ ID NO:293 or 294. In some aspects, Fc comprises the amino acid sequence of SEQ ID NO:293 or 294. In some preferred aspects, CDR1, CDR2 and CDR3 of each of VH1, VH2, VH3, VH4, VL1, VL2, VL3 and VL4 have at least 90% identity with the corresponding amino acid sequences specified above, optionally with (i) an Fc having at least 90% identity with the corresponding amino acid sequence recited above; and/or (ii) one or more linker sequence as specified above. In some particularly preferred aspects, CDR1, CDR2 and CDR3 of each of VH1, VH2, VH3, VH4, VL1, VL2, VL3 and VL4 comprise or consist of the corresponding amino acid sequences specified above, optionally with (i) an Fc comprising or consisting of the corresponding amino acid sequence recited above; and/or (ii) one or more linker sequence as specified above.

[0654] In some aspects, (i) VH1 and VH3 comprise a CDR1 comprising an amino acid sequence having at least 80%, at least 85%, at least 90%, at least 91%, at least 92%, at least 93%, at least 94%, at least 95%, at least 96%, at least 97%, at least 98%, at least 99% or 100% identity to SEQ ID NO:264; a CDR2 comprising an amino acid sequence having at least 80%, at least 85%, at least 90%, at least 91%, at least 92%, at least 93%, at least 94%, at least 95%, at least 96%, at least 97%, at least 98%, at least 99% or 100% identity to SEQ ID NO:265; and a CDR3 comprising an amino acid sequence having at least 80%, at least 85%, at least 90%, at least 91%, at least 92%, at least 93%, at least 94%, at least 95%, at least 96%, at least 97%, at least 98%, at least 99% or 100% identity to SEQ ID NO:266; (ii) VH2 comprises a CDR1 comprising an amino acid sequence having at least 80%, at least 85%, at least 90%, at least 91%, at least 92%, at least 93%, at least 94%, at least 95%, at least 96%, at least 97%, at least 98%, at least 99% or 100% identity to SEQ ID NO:59; a CDR2 comprising an amino acid sequence having at least 80%, at least 85%, at least 90%, at least 91%, at least 92%, at least 93%, at least 94%, at least 95%, at least 96%, at least 97%, at least 98%, at least 99% or 100% identity to SEQ ID NO:60; and a CDR3 comprising an amino acid sequence having at least 80%, at least 85%, at least 90%, at least 91%, at least 92%, at least 93%, at least 94%, at least 95%, at least 96%, at least 97%, at least 98%, at least 99% or 100% identity to SEQ ID NO:61; (iii) VH4 comprises a CDR1 comprising an amino acid sequence having at least 80%, at least 85%, at least 90%, at least 91%, at least 92%, at least 93%, at least 94%, at least 95%, at least 96%, at least 97%, at least 98%, at least 99% or 100% identity to SEQ ID NO:280; a CDR2 comprising an amino acid sequence having at least 80%, at least 85%, at least 90%, at least 91%, at least 92%, at least 93%, at least 94%, at least 95%, at least 96%, at least 97%, at least 98%, at least 99% or 100% identity to SEQ ID NO:281; and a CDR3 comprising an amino acid sequence having at least 80%, at least 85%, at least 90%, at least 91%, at least 92%, at least 93%, at least 94%, at least 95%, at least 96%, at least 97%, at least 98%, at least 99% or 100% identity to SEQ ID NO:282; (iv) VL1 and VL3 comprise a CDR1 comprising an amino acid sequence having at least 80%, at least 85%, at least 90%, at least 91%, at least 92%, at least 93%, at least 94%, at least 95%, at least 96%, at least 97%, at least 98%, at least 99% or 100% identity to SEQ ID NO:260; a CDR2 comprising an amino acid sequence having at least 80%, at least 85%, at least 90%, at least 91%, at least 92%, at least 93%, at least 94%, at least 95%, at least 96%, at least 97%, at least 98%, at least 99% or 100% identity to SEQ ID NO:261; and a CDR3 comprising an amino acid sequence having at least 80%, at least 85%, at least 90%, at least 91%, at least 92%, at least 93%, at least 94%, at least 95%, at least 96%, at least 97%, at least 98%, at least 99% or 100% identity to SEQ ID NO:262; (v) VL2 comprises a CDR1 comprising an amino acid sequence having at least 80%, at least 85%, at least 90%, at least 91%, at least 92%, at least 93%, at least 94%, at least 95%, at least 96%, at least 97%, at least 98%, at least 99% or 100% identity to SEQ ID NO:55; a CDR2 comprising an amino acid sequence having at least 80%, at least 85%, at least 90%, at least 91%, at least 92%, at least 93%, at least 94%, at least 95%, at least 96%, at least 97%, at least 98%, at least 99% or 100% identity to SEQ ID NO:56 (having the sequence of GTN); and a CDR3 comprising an amino acid sequence having at least 80%, at least 85%, at least 90%, at least 91%, at least 92%, at least 93%, at least 94%, at least 95%, at least 96%, at least 97%, at least 98%, at least 99% or 100% identity to SEQ ID NO:57; and (vi) VL4 comprises a CDR1 comprising an amino acid sequence having at least 80%, at least 85%, at least 90%, at least 91%, at least 92%, at least 93%, at least 94%, at least 95%, at least 96%, at least 97%, at least 98%, at least 99% or 100% identity to SEQ ID NO:276; a CDR2 comprising an amino acid sequence having at least 80%, at least 85%, at least 90%, at least 91%, at least 92%, at least 93%, at least 94%, at least 95%, at least 96%, at least 97%, at least 98%, at least 99% or 100% identity to SEQ ID NO:277 (having the sequence of LGS); and a CDR3 comprising an amino acid sequence having at least 80%, at least 85%, at least 90%, at least 91%, at least 92%, at least 93%, at least 94%, at least 95%, at least 96%, at least 97%, at least 98%, at least 99% or 100% identity to SEQ ID NO:278. In some aspects, (i) VH1 and VH3 comprise a CDR1 comprising the amino acid sequence of SEQ ID NO:264; a CDR2 comprising the amino acid sequence of SEQ ID NO:265; and a CDR3 comprising the amino acid sequence of SEQ ID NO:266; (ii) VH2 comprises a CDR1 comprising the amino acid sequence of SEQ ID NO:59; a CDR2 comprising the amino acid sequence of SEQ ID NO:60; and a CDR3 comprising the amino acid sequence of SEQ ID NO:61; (iii) VH4 comprises a CDR1 comprising the amino acid sequence of SEQ ID NO:280; a CDR2 comprising the amino acid sequence of SEQ ID NO:281; and a CDR3 comprising the amino acid sequence of SEQ ID NO:282; (iv) VL1 and VL3 comprise a CDR1 comprising the amino acid sequence of SEQ ID NO:260; a CDR2 comprising the amino acid sequence of SEQ ID NO:261; and a CDR3 comprising the amino acid sequence of SEQ ID NO:262; (v) VL2 comprises a CDR1 comprising the amino acid sequence of SEQ ID NO:55; a CDR2 comprising the amino acid sequence of SEQ ID NO:56 (having the sequence of GTN); and a CDR3 comprising the amino acid sequence of SEQ ID NO:57; and (vi) VL4 comprises a CDR1 comprising the amino acid sequence of SEQ ID NO:276; a CDR2 comprising the amino acid sequence of SEQ ID NO:277 (having the sequence of LGS); and a CDR3 comprising the amino acid sequence of SEQ ID NO:278. In some aspects, L1-L16 comprise the amino acid sequence of any one of SEQ ID NOs:1-34, wherein SEQ ID NO:1 has the amino acid sequence of G, SEQ ID NO:2 has the amino acid sequence of A, SEQ ID NO:3 has the amino acid sequence of GSS and SEQ ID NO:4 has the amino acid sequence of ASG. In some aspects, L1 or L4 and L7 or L10 comprise the amino acid sequence of SEQ ID NO:6; L2 or L5 and L8 or L11 comprise the amino acid sequence of SEQ ID NO:27; and L3 or L6 and L9 or L12 comprise the amino acid sequence of SEQ ID NO:6. In some aspects, L1 or L5 and L9 or L13 comprise the amino acid sequence of SEQ ID NO:6; L2 or L6 and L10 or L14 comprise the amino acid sequence of SEQ ID NO:27; L3 or L7 and L11 or L15 comprise the amino acid sequence of SEQ ID NO:6; and L4 or L8 and L12 or L16 comprise the amino acid sequence of SEQ ID NO:12. In some aspects, Fc comprises a knob-into-hole modification or Fc effector function knockout mutation. In some aspects, Fc comprises an amino acid sequence having at least 80%, at least 85%, at least 90%, at least 91%, at least 92%, at least 93%, at least 94%, at least 95%, at least 96%, at least 97%, at least 98%, at least 99%, or 100% identity to SEQ ID NO:293 or 294. In some aspects, Fc comprises the amino acid sequence of SEQ ID NO:293 or 294. In some preferred aspects, CDR1, CDR2 and CDR3 of each of VH1, VH2, VH3, VH4, VL1, VL2, VL3 and VL4 have at least 90% identity with the corresponding amino acid sequences specified above, optionally with (i) an Fc having at least 90% identity with the corresponding amino acid sequence recited above; and/or (ii) one or more linker sequence as specified above. In some particularly preferred aspects, CDR1, CDR2 and CDR3 of each of VH1, VH2, VH3, VH4, VL1, VL2, VL3 and VL4 comprise or consist of the corresponding amino acid sequences specified above, optionally with (i) an Fc comprising or consisting of the corresponding amino acid sequence recited above; and/or (ii) one or more linker sequence as specified above.

[0655] In some aspects, (i) VH1 and VH4 comprise a CDR1 comprising an amino acid sequence having at least 80%, at least 85%, at least 90%, at least 91%, at least 92%, at least 93%, at least 94%, at least 95%, at least 96%, at least 97%, at least 98%, at least 99% or 100% identity to SEQ ID NO:264; a CDR2 comprising an amino acid sequence having at least 80%, at least 85%, at least 90%, at least 91%, at least 92%, at least 93%, at least 94%, at least 95%, at least 96%, at least 97%, at least 98%, at least 99% or 100% identity to SEQ ID NO:265; and a CDR3 comprising an amino acid sequence having at least 80%, at least 85%, at least 90%, at least 91%, at least 92%, at least 93%, at least 94%, at least 95%, at least 96%, at least 97%, at least 98%, at least 99% or 100% identity to SEQ ID NO:266; (ii) VH2 comprises a CDR1 comprising an amino acid sequence having at least 80%, at least 85%, at least 90%, at least 91%, at least 92%, at least 93%, at least 94%, at least 95%, at least 96%, at least 97%, at least 98%, at least 99% or 100% identity to SEQ ID NO:59; a CDR2 comprising an amino acid sequence having at least 80%, at least 85%, at least 90%, at least 91%, at least 92%, at least 93%, at least 94%, at least 95%, at least 96%, at least 97%, at least 98%, at least 99% or 100% identity to SEQ ID NO:60; and a CDR3 comprising an amino acid sequence having at least 80%, at least 85%, at least 90%, at least 91%, at least 92%, at least 93%, at least 94%, at least 95%, at least 96%, at least 97%, at least 98%, at least 99% or 100% identity to SEQ ID NO:61; (iii) VH3 comprises a CDR1 comprising an amino acid sequence having at least 80%, at least 85%, at least 90%, at least 91%, at least 92%, at least 93%, at least 94%, at least 95%, at least 96%, at least 97%, at least 98%, at least 99% or 100% identity to SEQ ID NO:280; a CDR2 comprising an amino acid sequence having at least 80%, at least 85%, at least 90%, at least 91%, at least 92%, at least 93%, at least 94%, at least 95%, at least 96%, at least 97%, at least 98%, at least 99% or 100% identity to SEQ ID NO:281; and a CDR3 comprising an amino acid sequence having at least 80%, at least 85%, at least 90%, at least 91%, at least 92%, at least 93%, at least 94%, at least 95%, at least 96%, at least 97%, at least 98%, at least 99% or 100% identity to SEQ ID NO:282; (iv) VL1 and VL4 comprise a CDR1 comprising an amino acid sequence having at least 80%, at least 85%, at least 90%, at least 91%, at least 92%, at least 93%, at least 94%, at least 95%, at least 96%, at least 97%, at least 98%, at least 99% or 100% identity to SEQ ID NO:260; a CDR2 comprising an amino acid sequence having at least 80%, at least 85%, at least 90%, at least 91%, at least 92%, at least 93%, at least 94%, at least 95%, at least 96%, at least 97%, at least 98%, at least 99% or 100% identity to SEQ ID NO:261; and a CDR3 comprising an amino acid sequence having at least 80%, at least 85%, at least 90%, at least 91%, at least 92%, at least 93%, at least 94%, at least 95%, at least 96%, at least 97%, at least 98%, at least 99% or 100% identity to SEQ ID NO:262; (v) VL2 comprises a CDR1 comprising an amino acid sequence having at least 80%, at least 85%, at least 90%, at least 91%, at least 92%, at least 93%, at least 94%, at least 95%, at least 96%, at least 97%, at least 98%, at least 99% or 100% identity to SEQ ID NO:55; a CDR2 comprising an amino acid sequence having at least 80%, at least 85%, at least 90%, at least 91%, at least 92%, at least 93%, at least 94%, at least 95%, at least 96%, at least 97%, at least 98%, at least 99% or 100% identity to SEQ ID NO:56 (having the sequence of GTN); and a CDR3 comprising an amino acid sequence having at least 80%, at least 85%, at least 90%, at least 91%, at least 92%, at least 93%, at least 94%, at least 95%, at least 96%, at least 97%, at least 98%, at least 99% or 100% identity to SEQ ID NO:57; and (vi) VL3 comprises a CDR1 comprising an amino acid sequence having at least 80%, at least 85%, at least 90%, at least 91%, at least 92%, at least 93%, at least 94%, at least 95%, at least 96%, at least 97%, at least 98%, at least 99% or 100% identity to SEQ ID NO:276; a CDR2 comprising an amino acid sequence having at least 80%, at least 85%, at least 90%, at least 91%, at least 92%, at least 93%, at least 94%, at least 95%, at least 96%, at least 97%, at least 98%, at least 99% or 100% identity to SEQ ID NO:277 (having the sequence of LGS); and a CDR3 comprising an amino acid sequence having at least 80%, at least 85%, at least 90%, at least 91%, at least 92%, at least 93%, at least 94%, at least 95%, at least 96%, at least 97%, at least 98%, at least 99% or 100% identity to SEQ ID NO:278. In some aspects, (i) VH1 and VH4 comprise a CDR1 comprising the amino acid sequence of SEQ ID NO:264; a CDR2 comprising the amino acid sequence of SEQ ID NO:265; and a CDR3 comprising the amino acid sequence of SEQ ID NO:266; (ii) VH2 comprises a CDR1 comprising the amino acid sequence of SEQ ID NO:59; a CDR2 comprising the amino acid sequence of SEQ ID NO:60; and a CDR3 comprising the amino acid sequence of SEQ ID NO:61; (iii) VH3 comprises a CDR1 comprising the amino acid sequence of SEQ ID NO:280; a CDR2 comprising the amino acid sequence of SEQ ID NO:281; and a CDR3 comprising the amino acid sequence of SEQ ID NO:282; (iv) VL1 and VL4 comprise a CDR1 comprising the amino acid sequence of SEQ ID NO:260; a CDR2 comprising the amino acid sequence of SEQ ID NO:261; and a CDR3 comprising the amino acid sequence of SEQ ID NO:262; (v) VL2 comprises a CDR1 comprising the amino acid sequence of SEQ ID NO:55; a CDR2 comprising the amino acid sequence of SEQ ID NO:56 (having the sequence of GTN); and a CDR3 comprising the amino acid sequence of SEQ ID NO:57; and (vi) VL3 comprises a CDR1 comprising the amino acid sequence of SEQ ID NO:276; a CDR2 comprising the amino acid sequence of SEQ ID NO:277 (having the sequence of LGS); and a CDR3 comprising the amino acid sequence of SEQ ID NO:278. In some aspects, L1-L16 comprise the amino acid sequence of any one of SEQ ID NOs:1-34, wherein SEQ ID NO:1 has the amino acid sequence of G, SEQ ID NO:2 has the amino acid sequence of A, SEQ ID NO:3 has the amino acid sequence of GSS and SEQ ID NO:4 has the amino acid sequence of ASG. In some aspects, L1 or L4 and L7 or L10 comprise the amino acid sequence of SEQ ID NO:6; L2 or L5 and L8 or L11 comprise the amino acid sequence of SEQ ID NO:27; and L3 or L6 and L9 or L12 comprise the amino acid sequence of SEQ ID NO:6. In some aspects, L1 or L5 and L9 or L13 comprise the amino acid sequence of SEQ ID NO:6; L2 or L6 and L10 or L14 comprise the amino acid sequence of SEQ ID NO:27; L3 or L7 and L11 or L15 comprise the amino acid sequence of SEQ ID NO:6; and L4 or L8 and L12 or L16 comprise the amino acid sequence of SEQ ID NO:12. In some aspects, Fc comprises a knob-into-hole modification or Fc effector function knockout mutation. In some aspects, Fc comprises an amino acid sequence having at least 80%, at least 85%, at least 90%, at least 91%, at least 92%, at least 93%, at least 94%, at least 95%, at least 96%, at least 97%, at least 98%, at least 99%, or 100% identity to SEQ ID NO:293 or 294. In some aspects, Fc comprises the amino acid sequence of SEQ ID NO:293 or 294. In some preferred aspects, CDR1, CDR2 and CDR3 of each of VH1, VH2, VH3, VH4, VL1, VL2, VL3 and VL4 have at least 90% identity with the corresponding amino acid sequences specified above, optionally with (i) an Fc having at least 90% identity with the corresponding amino acid sequence recited above; and/or (ii) one or more linker sequence as specified above. In some particularly preferred aspects, CDR1, CDR2 and CDR3 of each of VH1, VH2, VH3, VH4, VL1, VL2, VL3 and VL4 comprise or consist of the corresponding amino acid sequences specified above, optionally with (i) an Fc comprising or consisting of the corresponding amino acid sequence recited above; and/or (ii) one or more linker sequence as specified above.

[0656] In some aspects, (i) VH1 and VH3 comprise a CDR1 comprising an amino acid sequence having at least 80%, at least 85%, at least 90%, at least 91%, at least 92%, at least 93%, at least 94%, at least 95%, at least 96%, at least 97%, at least 98%, at least 99% or 100% identity to SEQ ID NO:59; a CDR2 comprising an amino acid sequence having at least 80%, at least 85%, at least 90%, at least 91%, at least 92%, at least 93%, at least 94%, at least 95%, at least 96%, at least 97%, at least 98%, at least 99% or 100% identity to SEQ ID NO:60; and a CDR3 comprising an amino acid sequence having at least 80%, at least 85%, at least 90%, at least 91%, at least 92%, at least 93%, at least 94%, at least 95%, at least 96%, at least 97%, at least 98%, at least 99% or 100% identity to SEQ ID NO:61; (ii) VH2 comprises a CDR1 comprising an amino acid sequence having at least 80%, at least 85%, at least 90%, at least 91%, at least 92%, at least 93%, at least 94%, at least 95%, at least 96%, at least 97%, at least 98%, at least 99% or 100% identity to SEQ ID NO:264; a CDR2 comprising an amino acid sequence having at least 80%, at least 85%, at least 90%, at least 91%, at least 92%, at least 93%, at least 94%, at least 95%, at least 96%, at least 97%, at least 98%, at least 99% or 100% identity to SEQ ID NO:265; and a CDR3 comprising an amino acid sequence having at least 80%, at least 85%, at least 90%, at least 91%, at least 92%, at least 93%, at least 94%, at least 95%, at least 96%, at least 97%, at least 98%, at least 99% or 100% identity to SEQ ID NO:266; (iii) VH4 comprises a CDR1 comprising an amino acid sequence having at least 80%, at least 85%, at least 90%, at least 91%, at least 92%, at least 93%, at least 94%, at least 95%, at least 96%, at least 97%, at least 98%, at least 99% or 100% identity to SEQ ID NO:280; a CDR2 comprising an amino acid sequence having at least 80%, at least 85%, at least 90%, at least 91%, at least 92%, at least 93%, at least 94%, at least 95%, at least 96%, at least 97%, at least 98%, at least 99% or 100% identity to SEQ ID NO:281; and a CDR3 comprising an amino acid sequence having at least 80%, at least 85%, at least 90%, at least 91%, at least 92%, at least 93%, at least 94%, at least 95%, at least 96%, at least 97%, at least 98%, at least 99% or 100% identity to SEQ ID NO:282; (iv) VL1 and VL3 comprise a CDR1 comprising an amino acid sequence having at least 80%, at least 85%, at least 90%, at least 91%, at least 92%, at least 93%, at least 94%, at least 95%, at least 96%, at least 97%, at least 98%, at least 99% or 100% identity to SEQ ID NO:55; a CDR2 comprising an amino acid sequence having at least 80%, at least 85%, at least 90%, at least 91%, at least 92%, at least 93%, at least 94%, at least 95%, at least 96%, at least 97%, at least 98%, at least 99% or 100% identity to SEQ ID NO:56 (having the sequence of GTN); and a CDR3 comprising an amino acid sequence having at least 80%, at least 85%, at least 90%, at least 91%, at least 92%, at least 93%, at least 94%, at least 95%, at least 96%, at least 97%, at least 98%, at least 99% or 100% identity to SEQ ID NO:57; (v) VL2 comprises a CDR1 comprising an amino acid sequence having at least 80%, at least 85%, at least 90%, at least 91%, at least 92%, at least 93%, at least 94%, at least 95%, at least 96%, at least 97%, at least 98%, at least 99% or 100% identity to SEQ ID NO:260; a CDR2 comprising an amino acid sequence having at least 80%, at least 85%, at least 90%, at least 91%, at least 92%, at least 93%, at least 94%, at least 95%, at least 96%, at least 97%, at least 98%, at least 99% or 100% identity to SEQ ID NO:261; and a CDR3 comprising an amino acid sequence having at least 80%, at least 85%, at least 90%, at least 91%, at least 92%, at least 93%, at least 94%, at least 95%, at least 96%, at least 97%, at least 98%, at least 99% or 100% identity to SEQ ID NO:262; and (vi) VL4 comprises a CDR1 comprising an amino acid sequence having at least 80%, at least 85%, at least 90%, at least 91%, at least 92%, at least 93%, at least 94%, at least 95%, at least 96%, at least 97%, at least 98%, at least 99% or 100% identity to SEQ ID NO:276; a CDR2 comprising an amino acid sequence having at least 80%, at least 85%, at least 90%, at least 91%, at least 92%, at least 93%, at least 94%, at least 95%, at least 96%, at least 97%, at least 98%, at least 99% or 100% identity to SEQ ID NO:277 (having the sequence of LGS); and a CDR3 comprising an amino acid sequence having at least 80%, at least 85%, at least 90%, at least 91%, at least 92%, at least 93%, at least 94%, at least 95%, at least 96%, at least 97%, at least 98%, at least 99% or 100% identity to SEQ ID NO:278. In some aspects, (i) VH1 and VH3 comprise a CDR1 comprising the amino acid sequence of SEQ ID NO:59; a CDR2 comprising the amino acid sequence of SEQ ID NO:60; and a CDR3 comprising the amino acid sequence of SEQ ID NO:61; (ii) VH2 comprises a CDR1 comprising the amino acid sequence of SEQ ID NO:264; a CDR2 comprising the amino acid sequence of SEQ ID NO:265; and a CDR3 comprising the amino acid sequence of SEQ ID NO:266; (iii) VH4 comprises a CDR1 comprising the amino acid sequence of SEQ ID NO:280; a CDR2 comprising the amino acid sequence of SEQ ID NO:281; and a CDR3 comprising the amino acid sequence of SEQ ID NO:282; (iv) VL1 and VL3 comprise a CDR1 comprising the amino acid sequence of SEQ ID NO:55; a CDR2 comprising the amino acid sequence of SEQ ID NO:56 (having the sequence of GTN); and a CDR3 comprising the amino acid sequence of SEQ ID NO:57; (v) VL2 comprises a CDR1 comprising the amino acid sequence of SEQ ID NO:260; a CDR2 comprising the amino acid sequence of SEQ ID NO:261; and a CDR3 comprising the amino acid sequence of SEQ ID NO:262; and (vi) VL4 comprises a CDR1 comprising the amino acid sequence of SEQ ID NO:276; a CDR2 comprising the amino acid sequence of SEQ ID NO:277 (having the sequence of LGS); and a CDR3 comprising the amino acid sequence of SEQ ID NO:278. In some aspects, L1-L16 comprise the amino acid sequence of any one of SEQ ID NOs:1-34, wherein SEQ ID NO:1 has the amino acid sequence of G, SEQ ID NO:2 has the amino acid sequence of A, SEQ ID NO:3 has the amino acid sequence of GSS and SEQ ID NO:4 has the amino acid sequence of ASG. In some aspects, L1 or L4 and L7 or L10 comprise the amino acid sequence of SEQ ID NO:6; L2 or L5 and L8 or L11 comprise the amino acid sequence of SEQ ID NO:27; and L3 or L6 and L9 or L12 comprise the amino acid sequence of SEQ ID NO:6. In some aspects, L1 or L5 and L9 or L13 comprise the amino acid sequence of SEQ ID NO:6; L2 or L6 and L10 or L14 comprise the amino acid sequence of SEQ ID NO:27; L3 or L7 and L11 or L15 comprise the amino acid sequence of SEQ ID NO:6; and L4 or L8 and L12 or L16 comprise the amino acid sequence of SEQ ID NO:12. In some aspects, Fc comprises a knob-into-hole modification or Fc effector function knockout mutation. In some aspects, Fc comprises an amino acid sequence having at least 80%, at least 85%, at least 90%, at least 91%, at least 92%, at least 93%, at least 94%, at least 95%, at least 96%, at least 97%, at least 98%, at least 99%, or 100% identity to SEQ ID NO:293 or 294. In some aspects, Fc comprises the amino acid sequence of SEQ ID NO:293 or 294. In some preferred aspects, CDR1, CDR2 and CDR3 of each of VH1, VH2, VH3, VH4, VL1, VL2, VL3 and VL4 have at least 90% identity with the corresponding amino acid sequences specified above, optionally with (i) an Fc having at least 90% identity with the corresponding amino acid sequence recited above; and/or (ii) one or more linker sequence as specified above. In some particularly preferred aspects, CDR1, CDR2 and CDR3 of each of VH1, VH2, VH3, VH4, VL1, VL2, VL3 and VL4 comprise or consist of the corresponding amino acid sequences specified above, optionally with (i) an Fc comprising or consisting of the corresponding amino acid sequence recited above; and/or (ii) one or more linker sequence as specified above.

[0657] In some aspects, (i) VH1 and VH4 comprise a CDR1 comprising an amino acid sequence having at least 80%, at least 85%, at least 90%, at least 91%, at least 92%, at least 93%, at least 94%, at least 95%, at least 96%, at least 97%, at least 98%, at least 99% or 100% identity to SEQ ID NO:59; a CDR2 comprising an amino acid sequence having at least 80%, at least 85%, at least 90%, at least 91%, at least 92%, at least 93%, at least 94%, at least 95%, at least 96%, at least 97%, at least 98%, at least 99% or 100% identity to SEQ ID NO:60; and a CDR3 comprising an amino acid sequence having at least 80%, at least 85%, at least 90%, at least 91%, at least 92%, at least 93%, at least 94%, at least 95%, at least 96%, at least 97%, at least 98%, at least 99% or 100% identity to SEQ ID NO:61; (ii) VH2 comprises a CDR1 comprising an amino acid sequence having at least 80%, at least 85%, at least 90%, at least 91%, at least 92%, at least 93%, at least 94%, at least 95%, at least 96%, at least 97%, at least 98%, at least 99% or 100% identity to SEQ ID NO:264; a CDR2 comprising an amino acid sequence having at least 80%, at least 85%, at least 90%, at least 91%, at least 92%, at least 93%, at least 94%, at least 95%, at least 96%, at least 97%, at least 98%, at least 99% or 100% identity to SEQ ID NO:265; and a CDR3 comprising an amino acid sequence having at least 80%, at least 85%, at least 90%, at least 91%, at least 92%, at least 93%, at least 94%, at least 95%, at least 96%, at least 97%, at least 98%, at least 99% or 100% identity to SEQ ID NO:266; (iii) VH3 comprises a CDR1 comprising an amino acid sequence having at least 80%, at least 85%, at least 90%, at least 91%, at least 92%, at least 93%, at least 94%, at least 95%, at least 96%, at least 97%, at least 98%, at least 99% or 100% identity to SEQ ID NO:280; a CDR2 comprising an amino acid sequence having at least 80%, at least 85%, at least 90%, at least 91%, at least 92%, at least 93%, at least 94%, at least 95%, at least 96%, at least 97%, at least 98%, at least 99% or 100% identity to SEQ ID NO:281; and a CDR3 comprising an amino acid sequence having at least 80%, at least 85%, at least 90%, at least 91%, at least 92%, at least 93%, at least 94%, at least 95%, at least 96%, at least 97%, at least 98%, at least 99% or 100% identity to SEQ ID NO:282; (iv) VL1 and VL4 comprise a CDR1 comprising an amino acid sequence having at least 80%, at least 85%, at least 90%, at least 91%, at least 92%, at least 93%, at least 94%, at least 95%, at least 96%, at least 97%, at least 98%, at least 99% or 100% identity to SEQ ID NO:55; a CDR2 comprising an amino acid sequence having at least 80%, at least 85%, at least 90%, at least 91%, at least 92%, at least 93%, at least 94%, at least 95%, at least 96%, at least 97%, at least 98%, at least 99% or 100% identity to SEQ ID NO:56 (having the sequence of GTN); and a CDR3 comprising an amino acid sequence having at least 80%, at least 85%, at least 90%, at least 91%, at least 92%, at least 93%, at least 94%, at least 95%, at least 96%, at least 97%, at least 98%, at least 99% or 100% identity to SEQ ID NO:57; (v) VL2 comprises a CDR1 comprising an amino acid sequence having at least 80%, at least 85%, at least 90%, at least 91%, at least 92%, at least 93%, at least 94%, at least 95%, at least 96%, at least 97%, at least 98%, at least 99% or 100% identity to SEQ ID NO:260; a CDR2 comprising an amino acid sequence having at least 80%, at least 85%, at least 90%, at least 91%, at least 92%, at least 93%, at least 94%, at least 95%, at least 96%, at least 97%, at least 98%, at least 99% or 100% identity to SEQ ID NO:261; and a CDR3 comprising an amino acid sequence having at least 80%, at least 85%, at least 90%, at least 91%, at least 92%, at least 93%, at least 94%, at least 95%, at least 96%, at least 97%, at least 98%, at least 99% or 100% identity to SEQ ID NO:262; and (vi) VL3 comprises a CDR1 comprising an amino acid sequence having at least 80%, at least 85%, at least 90%, at least 91%, at least 92%, at least 93%, at least 94%, at least 95%, at least 96%, at least 97%, at least 98%, at least 99% or 100% identity to SEQ ID NO:276; a CDR2 comprising an amino acid sequence having at least 80%, at least 85%, at least 90%, at least 91%, at least 92%, at least 93%, at least 94%, at least 95%, at least 96%, at least 97%, at least 98%, at least 99% or 100% identity to SEQ ID NO:277 (having the sequence of LGS); and a CDR3 comprising an amino acid sequence having at least 80%, at least 85%, at least 90%, at least 91%, at least 92%, at least 93%, at least 94%, at least 95%, at least 96%, at least 97%, at least 98%, at least 99% or 100% identity to SEQ ID NO:278. In some aspects, (i) VH1 and VH4 comprise a CDR1 comprising the amino acid sequence of SEQ ID NO:59; a CDR2 comprising the amino acid sequence of SEQ ID NO:60; and a CDR3 comprising the amino acid sequence of SEQ ID NO:61; (ii) VH2 comprises a CDR1 comprising the amino acid sequence of SEQ ID NO:264; a CDR2 comprising the amino acid sequence of SEQ ID NO:265; and a CDR3 comprising the amino acid sequence of SEQ ID NO:266; (iii) VH3 comprises a CDR1 comprising the amino acid sequence of SEQ ID NO:280; a CDR2 comprising the amino acid sequence of SEQ ID NO:281; and a CDR3 comprising the amino acid sequence of SEQ ID NO:282; (iv) VL1 and VL4 comprise a CDR1 comprising the amino acid sequence of SEQ ID NO:55; a CDR2 comprising the amino acid sequence of SEQ ID NO:56 (having the sequence of GTN); and a CDR3 comprising the amino acid sequence of SEQ ID NO:57; (v) VL2 comprises a CDR1 comprising the amino acid sequence of SEQ ID NO:260; a CDR2 comprising the amino acid sequence of SEQ ID NO:261; and a CDR3 comprising the amino acid sequence of SEQ ID NO:262; and (vi) VL3 comprises a CDR1 comprising the amino acid sequence of SEQ ID NO:276; a CDR2 comprising the amino acid sequence of SEQ ID NO:277 (having the sequence of LGS); and a CDR3 comprising the amino acid sequence of SEQ ID NO:278. In some aspects, L1-L16 comprise the amino acid sequence of any one of SEQ ID NOs:1-34, wherein SEQ ID NO:1 has the amino acid sequence of G, SEQ ID NO:2 has the amino acid sequence of A, SEQ ID NO:3 has the amino acid sequence of GSS and SEQ ID NO:4 has the amino acid sequence of ASG. In some aspects, L1 or L4 and L7 or L10 comprise the amino acid sequence of SEQ ID NO:6; L2 or L5 and L8 or L11 comprise the amino acid sequence of SEQ ID NO:27; and L3 or L6 and L9 or L12 comprise the amino acid sequence of SEQ ID NO:6. In some aspects, L1 or L5 and L9 or L13 comprise the amino acid sequence of SEQ ID NO:6; L2 or L6 and L10 or L14 comprise the amino acid sequence of SEQ ID NO:27; L3 or L7 and L11 or L15 comprise the amino acid sequence of SEQ ID NO:6; and L4 or L8 and L12 or L16 comprise the amino acid sequence of SEQ ID NO:12. In some aspects, Fc comprises a knob-into-hole modification or Fc effector function knockout mutation. In some aspects, Fc comprises an amino acid sequence having at least 80%, at least 85%, at least 90%, at least 91%, at least 92%, at least 93%, at least 94%, at least 95%, at least 96%, at least 97%, at least 98%, at least 99%, or 100% identity to SEQ ID NO:293 or 294. In some aspects, Fc comprises the amino acid sequence of SEQ ID NO:293 or 294. In some preferred aspects, CDR1, CDR2 and CDR3 of each of VH1, VH2, VH3, VH4, VL1, VL2, VL3 and VL4 have at least 90% identity with the corresponding amino acid sequences specified above, optionally with (i) an Fc having at least 90% identity with the corresponding amino acid sequence recited above; and/or (ii) one or more linker sequence as specified above. In some particularly preferred aspects, CDR1, CDR2 and CDR3 of each of VH1, VH2, VH3, VH4, VL1, VL2, VL3 and VL4 comprise or consist of the corresponding amino acid sequences specified above, optionally with (i) an Fc comprising or consisting of the corresponding amino acid sequence recited above; and/or (ii) one or more linker sequence as specified above.

[0658] In some aspects, (i) VH1 comprises a CDR1 comprising an amino acid sequence having at least 80%, at least 85%, at least 90%, at least 91%, at least 92%, at least 93%, at least 94%, at least 95%, at least 96%, at least 97%, at least 98%, at least 99% or 100% identity to SEQ ID NO:264; a CDR2 comprising an amino acid sequence having at least 80%, at least 85%, at least 90%, at least 91%, at least 92%, at least 93%, at least 94%, at least 95%, at least 96%, at least 97%, at least 98%, at least 99% or 100% identity to SEQ ID NO:265; and a CDR3 comprising an amino acid sequence having at least 80%, at least 85%, at least 90%, at least 91%, at least 92%, at least 93%, at least 94%, at least 95%, at least 96%, at least 97%, at least 98%, at least 99% or 100% identity to SEQ ID NO:266; (ii) VH2 and VH3 comprise a CDR1 comprising an amino acid sequence having at least 80%, at least 85%, at least 90%, at least 91%, at least 92%, at least 93%, at least 94%, at least 95%, at least 96%, at least 97%, at least 98%, at least 99% or 100% identity to SEQ ID NO:59; a CDR2 comprising an amino acid sequence having at least 80%, at least 85%, at least 90%, at least 91%, at least 92%, at least 93%, at least 94%, at least 95%, at least 96%, at least 97%, at least 98%, at least 99% or 100% identity to SEQ ID NO:60; and a CDR3 comprising an amino acid sequence having at least 80%, at least 85%, at least 90%, at least 91%, at least 92%, at least 93%, at least 94%, at least 95%, at least 96%, at least 97%, at least 98%, at least 99% or 100% identity to SEQ ID NO:61; (iii) VH4 comprises a CDR1 comprising an amino acid sequence having at least 80%, at least 85%, at least 90%, at least 91%, at least 92%, at least 93%, at least 94%, at least 95%, at least 96%, at least 97%, at least 98%, at least 99% or 100% identity to SEQ ID NO:280; a CDR2 comprising an amino acid sequence having at least 80%, at least 85%, at least 90%, at least 91%, at least 92%, at least 93%, at least 94%, at least 95%, at least 96%, at least 97%, at least 98%, at least 99% or 100% identity to SEQ ID NO:281; and a CDR3 comprising an amino acid sequence having at least 80%, at least 85%, at least 90%, at least 91%, at least 92%, at least 93%, at least 94%, at least 95%, at least 96%, at least 97%, at least 98%, at least 99% or 100% identity to SEQ ID NO:282; (iv) VL1 comprises a CDR1 comprising an amino acid sequence having at least 80%, at least 85%, at least 90%, at least 91%, at least 92%, at least 93%, at least 94%, at least 95%, at least 96%, at least 97%, at least 98%, at least 99% or 100% identity to SEQ ID NO:260; a CDR2 comprising an amino acid sequence having at least 80%, at least 85%, at least 90%, at least 91%, at least 92%, at least 93%, at least 94%, at least 95%, at least 96%, at least 97%, at least 98%, at least 99% or 100% identity to SEQ ID NO:261; and a CDR3 comprising an amino acid sequence having at least 80%, at least 85%, at least 90%, at least 91%, at least 92%, at least 93%, at least 94%, at least 95%, at least 96%, at least 97%, at least 98%, at least 99% or 100% identity to SEQ ID NO:262; (v) VL2 and VL3 comprise a CDR1 comprising an amino acid sequence having at least 80%, at least 85%, at least 90%, at least 91%, at least 92%, at least 93%, at least 94%, at least 95%, at least 96%, at least 97%, at least 98%, at least 99% or 100% identity to SEQ ID NO:55; a CDR2 comprising an amino acid sequence having at least 80%, at least 85%, at least 90%, at least 91%, at least 92%, at least 93%, at least 94%, at least 95%, at least 96%, at least 97%, at least 98%, at least 99% or 100% identity to SEQ ID NO:56 (having the sequence of GTN); and a CDR3 comprising an amino acid sequence having at least 80%, at least 85%, at least 90%, at least 91%, at least 92%, at least 93%, at least 94%, at least 95%, at least 96%, at least 97%, at least 98%, at least 99% or 100% identity to SEQ ID NO:57; and (vi) VL4 comprises a CDR1 comprising an amino acid sequence having at least 80%, at least 85%, at least 90%, at least 91%, at least 92%, at least 93%, at least 94%, at least 95%, at least 96%, at least 97%, at least 98%, at least 99% or 100% identity to SEQ ID NO:276; a CDR2 comprising an amino acid sequence having at least 80%, at least 85%, at least 90%, at least 91%, at least 92%, at least 93%, at least 94%, at least 95%, at least 96%, at least 97%, at least 98%, at least 99% or 100% identity to SEQ ID NO:277 (having the sequence of LGS); and a CDR3 comprising an amino acid sequence having at least 80%, at least 85%, at least 90%, at least 91%, at least 92%, at least 93%, at least 94%, at least 95%, at least 96%, at least 97%, at least 98%, at least 99% or 100% identity to SEQ ID NO:278. In some aspects, (i) VH1 comprises a CDR1 comprising the amino acid sequence of SEQ ID NO:264; a CDR2 comprising the amino acid sequence of SEQ ID NO:265; and a CDR3 comprising the amino acid sequence of SEQ ID NO:266; (ii) VH2 and VH3 comprise a CDR1 comprising the amino acid sequence of SEQ ID NO:59; a CDR2 comprising the amino acid sequence of SEQ ID NO:60; and a CDR3 comprising the amino acid sequence of SEQ ID NO:61; (iii) VH4 comprises a CDR1 comprising the amino acid sequence of SEQ ID NO:280; a CDR2 comprising the amino acid sequence of SEQ ID NO:281; and a CDR3 comprising the amino acid sequence of SEQ ID NO:282; (iv) VL1 comprises a CDR1 comprising the amino acid sequence of SEQ ID NO:260; a CDR2 comprising the amino acid sequence of SEQ ID NO:261; and a CDR3 comprising the amino acid sequence of SEQ ID NO:262; (v) VL2 and VL3 comprise a CDR1 comprising the amino acid sequence of SEQ ID NO:55; a CDR2 comprising the amino acid sequence of SEQ ID NO:56 (having the sequence of GTN); and a CDR3 comprising the amino acid sequence of SEQ ID NO:57; and (vi) VL4 comprises a CDR1 comprising the amino acid sequence of SEQ ID NO:276; a CDR2 comprising the amino acid sequence of SEQ ID NO:277 (having the sequence of LGS); and a CDR3 comprising the amino acid sequence of SEQ ID NO:278. In some aspects, L1-L16 comprise the amino acid sequence of any one of SEQ ID NOs:1-34, wherein SEQ ID NO:1 has the amino acid sequence of G, SEQ ID NO:2 has the amino acid sequence of A, SEQ ID NO:3 has the amino acid sequence of GSS and SEQ ID NO:4 has the amino acid sequence of ASG. In some aspects, L1 or L4 and L7 or L10 comprise the amino acid sequence of SEQ ID NO:6; L2 or L5 and L8 or L11 comprise the amino acid sequence of SEQ ID NO:27; and L3 or L6 and L9 or L12 comprise the amino acid sequence of SEQ ID NO:6. In some aspects, L1 or L5 and L9 or L13 comprise the amino acid sequence of SEQ ID NO:6; L2 or L6 and L10 or L14 comprise the amino acid sequence of SEQ ID NO:27; L3 or L7 and L11 or L15 comprise the amino acid sequence of SEQ ID NO:6; and L4 or L8 and L12 or L16 comprise the amino acid sequence of SEQ ID NO:12. In some aspects, Fc comprises a knob-into-hole modification or Fc effector function knockout mutation. In some aspects, Fc comprises an amino acid sequence having at least 80%, at least 85%, at least 90%, at least 91%, at least 92%, at least 93%, at least 94%, at least 95%, at least 96%, at least 97%, at least 98%, at least 99%, or 100% identity to SEQ ID NO:293 or 294. In some aspects, Fc comprises the amino acid sequence of SEQ ID NO:293 or 294. In some preferred aspects, CDR1, CDR2 and CDR3 of each of VH1, VH2, VH3, VH4, VL1, VL2, VL3 and VL4 have at least 90% identity with the corresponding amino acid sequences specified above, optionally with (i) an Fc having at least 90% identity with the corresponding amino acid sequence recited above; and/or (ii) one or more linker sequence as specified above. In some particularly preferred aspects, CDR1, CDR2 and CDR3 of each of VH1, VH2, VH3, VH4, VL1, VL2, VL3 and VL4 comprise or consist of the corresponding amino acid sequences specified above, optionally with (i) an Fc comprising or consisting of the corresponding amino acid sequence recited above; and/or (ii) one or more linker sequence as specified above.

[0659] In some aspects, (i) VH1 comprises a CDR1 comprising an amino acid sequence having at least 80%, at least 85%, at least 90%, at least 91%, at least 92%, at least 93%, at least 94%, at least 95%, at least 96%, at least 97%, at least 98%, at least 99% or 100% identity to SEQ ID NO:264; a CDR2 comprising an amino acid sequence having at least 80%, at least 85%, at least 90%, at least 91%, at least 92%, at least 93%, at least 94%, at least 95%, at least 96%, at least 97%, at least 98%, at least 99% or 100% identity to SEQ ID NO:265; and a CDR3 comprising an amino acid sequence having at least 80%, at least 85%, at least 90%, at least 91%, at least 92%, at least 93%, at least 94%, at least 95%, at least 96%, at least 97%, at least 98%, at least 99% or 100% identity to SEQ ID NO:266; (ii) VH2 and VH4 comprise a CDR1 comprising an amino acid sequence having at least 80%, at least 85%, at least 90%, at least 91%, at least 92%, at least 93%, at least 94%, at least 95%, at least 96%, at least 97%, at least 98%, at least 99% or 100% identity to SEQ ID NO:59; a CDR2 comprising an amino acid sequence having at least 80%, at least 85%, at least 90%, at least 91%, at least 92%, at least 93%, at least 94%, at least 95%, at least 96%, at least 97%, at least 98%, at least 99% or 100% identity to SEQ ID NO:60; and a CDR3 comprising an amino acid sequence having at least 80%, at least 85%, at least 90%, at least 91%, at least 92%, at least 93%, at least 94%, at least 95%, at least 96%, at least 97%, at least 98%, at least 99% or 100% identity to SEQ ID NO:61; (iii) VH3 comprises a CDR1 comprising an amino acid sequence having at least 80%, at least 85%, at least 90%, at least 91%, at least 92%, at least 93%, at least 94%, at least 95%, at least 96%, at least 97%, at least 98%, at least 99% or 100% identity to SEQ ID NO:280; a CDR2 comprising an amino acid sequence having at least 80%, at least 85%, at least 90%, at least 91%, at least 92%, at least 93%, at least 94%, at least 95%, at least 96%, at least 97%, at least 98%, at least 99% or 100% identity to SEQ ID NO:281; and a CDR3 comprising an amino acid sequence having at least 80%, at least 85%, at least 90%, at least 91%, at least 92%, at least 93%, at least 94%, at least 95%, at least 96%, at least 97%, at least 98%, at least 99% or 100% identity to SEQ ID NO:282; (iv) VL1 comprises a CDR1 comprising an amino acid sequence having at least 80%, at least 85%, at least 90%, at least 91%, at least 92%, at least 93%, at least 94%, at least 95%, at least 96%, at least 97%, at least 98%, at least 99% or 100% identity to SEQ ID NO:260; a CDR2 comprising an amino acid sequence having at least 80%, at least 85%, at least 90%, at least 91%, at least 92%, at least 93%, at least 94%, at least 95%, at least 96%, at least 97%, at least 98%, at least 99% or 100% identity to SEQ ID NO:261; and a CDR3 comprising an amino acid sequence having at least 80%, at least 85%, at least 90%, at least 91%, at least 92%, at least 93%, at least 94%, at least 95%, at least 96%, at least 97%, at least 98%, at least 99% or 100% identity to SEQ ID NO:262; (v) VL2 and VL4 comprise a CDR1 comprising an amino acid sequence having at least 80%, at least 85%, at least 90%, at least 91%, at least 92%, at least 93%, at least 94%, at least 95%, at least 96%, at least 97%, at least 98%, at least 99% or 100% identity to SEQ ID NO:55; a CDR2 comprising an amino acid sequence having at least 80%, at least 85%, at least 90%, at least 91%, at least 92%, at least 93%, at least 94%, at least 95%, at least 96%, at least 97%, at least 98%, at least 99% or 100% identity to SEQ ID NO:56 (having the sequence of GTN); and a CDR3 comprising an amino acid sequence having at least 80%, at least 85%, at least 90%, at least 91%, at least 92%, at least 93%, at least 94%, at least 95%, at least 96%, at least 97%, at least 98%, at least 99% or 100% identity to SEQ ID NO:57; and (vi) VL3 comprises a CDR1 comprising an amino acid sequence having at least 80%, at least 85%, at least 90%, at least 91%, at least 92%, at least 93%, at least 94%, at least 95%, at least 96%, at least 97%, at least 98%, at least 99% or 100% identity to SEQ ID NO:276; a CDR2 comprising an amino acid sequence having at least 80%, at least 85%, at least 90%, at least 91%, at least 92%, at least 93%, at least 94%, at least 95%, at least 96%, at least 97%, at least 98%, at least 99% or 100% identity to SEQ ID NO:277 (having the sequence of LGS); and a CDR3 comprising an amino acid sequence having at least 80%, at least 85%, at least 90%, at least 91%, at least 92%, at least 93%, at least 94%, at least 95%, at least 96%, at least 97%, at least 98%, at least 99% or 100% identity to SEQ ID NO:278. In some aspects, (i) VH1 comprises a CDR1 comprising the amino acid sequence of SEQ ID NO:264; a CDR2 comprising the amino acid sequence of SEQ ID NO:265; and a CDR3 comprising the amino acid sequence of SEQ ID NO:266; (ii) VH2 and VH4 comprise a CDR1 comprising the amino acid sequence of SEQ ID NO:59; a CDR2 comprising the amino acid sequence of SEQ ID NO:60; and a CDR3 comprising the amino acid sequence of SEQ ID NO:61; (iii) VH3 comprises a CDR1 comprising the amino acid sequence of SEQ ID NO:280; a CDR2 comprising the amino acid sequence of SEQ ID NO:281; and a CDR3 comprising the amino acid sequence of SEQ ID NO:282; (iv) VL1 comprises a CDR1 comprising the amino acid sequence of SEQ ID NO:260; a CDR2 comprising the amino acid sequence of SEQ ID NO:261; and a CDR3 comprising the amino acid sequence of SEQ ID NO:262; (v) VL2 and VL4 comprise a CDR1 comprising the amino acid sequence of SEQ ID NO:55; a CDR2 comprising the amino acid sequence of SEQ ID NO:56 (having the sequence of GTN); and a CDR3 comprising the amino acid sequence of SEQ ID NO:57; and (vi) VL3 comprises a CDR1 comprising the amino acid sequence of SEQ ID NO:276; a CDR2 comprising the amino acid sequence of SEQ ID NO:277 (having the sequence of LGS); and a CDR3 comprising the amino acid sequence of SEQ ID NO:278. In some aspects, L1-L16 comprise the amino acid sequence of any one of SEQ ID NOs:1-34, wherein SEQ ID NO:1 has the amino acid sequence of G, SEQ ID NO:2 has the amino acid sequence of A, SEQ ID NO:3 has the amino acid sequence of GSS and SEQ ID NO:4 has the amino acid sequence of ASG. In some aspects, L1 or L4 and L7 or L10 comprise the amino acid sequence of SEQ ID NO:6; L2 or L5 and L8 or L11 comprise the amino acid sequence of SEQ ID NO:27; and L3 or L6 and L9 or L12 comprise the amino acid sequence of SEQ ID NO:6. In some aspects, L1 or L5 and L9 or L13 comprise the amino acid sequence of SEQ ID NO:6; L2 or L6 and L10 or L14 comprise the amino acid sequence of SEQ ID NO:27; L3 or L7 and L11 or L15 comprise the amino acid sequence of SEQ ID NO:6; and L4 or L8 and L12 or L16 comprise the amino acid sequence of SEQ ID NO:12. In some aspects, Fc comprises a knob-into-hole modification or Fc effector function knockout mutation. In some aspects, Fc comprises an amino acid sequence having at least 80%, at least 85%, at least 90%, at least 91%, at least 92%, at least 93%, at least 94%, at least 95%, at least 96%, at least 97%, at least 98%, at least 99%, or 100% identity to SEQ ID NO:293 or 294. In some aspects, Fc comprises the amino acid sequence of SEQ ID NO:293 or 294. In some preferred aspects, CDR1, CDR2 and CDR3 of each of VH1, VH2, VH3, VH4, VL1, VL2, VL3 and VL4 have at least 90% identity with the corresponding amino acid sequences specified above, optionally with (i) an Fc having at least 90% identity with the corresponding amino acid sequence recited above; and/or (ii) one or more linker sequence as specified above. In some particularly preferred aspects, CDR1, CDR2 and CDR3 of each of VH1, VH2, VH3, VH4, VL1, VL2, VL3 and VL4 comprise or consist of the corresponding amino acid sequences specified above, optionally with (i) an Fc comprising or consisting of the corresponding amino acid sequence recited above; and/or (ii) one or more linker sequence as specified above.

[0660] In some aspects, (i) VH1 comprises a CDR1 comprising an amino acid sequence having at least 80%, at least 85%, at least 90%, at least 91%, at least 92%, at least 93%, at least 94%, at least 95%, at least 96%, at least 97%, at least 98%, at least 99% or 100% identity to SEQ ID NO:264; a CDR2 comprising an amino acid sequence having at least 80%, at least 85%, at least 90%, at least 91%, at least 92%, at least 93%, at least 94%, at least 95%, at least 96%, at least 97%, at least 98%, at least 99% or 100% identity to SEQ ID NO:265; and a CDR3 comprising an amino acid sequence having at least 80%, at least 85%, at least 90%, at least 91%, at least 92%, at least 93%, at least 94%, at least 95%, at least 96%, at least 97%, at least 98%, at least 99% or 100% identity to SEQ ID NO:266; (ii) VH2 and VH3 comprise a CDR1 comprising an amino acid sequence having at least 80%, at least 85%, at least 90%, at least 91%, at least 92%, at least 93%, at least 94%, at least 95%, at least 96%, at least 97%, at least 98%, at least 99% or 100% identity to SEQ ID NO:280; a CDR2 comprising an amino acid sequence having at least 80%, at least 85%, at least 90%, at least 91%, at least 92%, at least 93%, at least 94%, at least 95%, at least 96%, at least 97%, at least 98%, at least 99% or 100% identity to SEQ ID NO:281; and a CDR3 comprising an amino acid sequence having at least 80%, at least 85%, at least 90%, at least 91%, at least 92%, at least 93%, at least 94%, at least 95%, at least 96%, at least 97%, at least 98%, at least 99% or 100% identity to SEQ ID NO:282; (iii) VH4 comprises a CDR1 comprising an amino acid sequence having at least 80%, at least 85%, at least 90%, at least 91%, at least 92%, at least 93%, at least 94%, at least 95%, at least 96%, at least 97%, at least 98%, at least 99% or 100% identity to SEQ ID NO:59; a CDR2 comprising an amino acid sequence having at least 80%, at least 85%, at least 90%, at least 91%, at least 92%, at least 93%, at least 94%, at least 95%, at least 96%, at least 97%, at least 98%, at least 99% or 100% identity to SEQ ID NO:60; and a CDR3 comprising an amino acid sequence having at least 80%, at least 85%, at least 90%, at least 91%, at least 92%, at least 93%, at least 94%, at least 95%, at least 96%, at least 97%, at least 98%, at least 99% or 100% identity to SEQ ID NO:61; (iv) VL1 comprises a CDR1 comprising an amino acid sequence having at least 80%, at least 85%, at least 90%, at least 91%, at least 92%, at least 93%, at least 94%, at least 95%, at least 96%, at least 97%, at least 98%, at least 99% or 100% identity to SEQ ID NO:260; a CDR2 comprising an amino acid sequence having at least 80%, at least 85%, at least 90%, at least 91%, at least 92%, at least 93%, at least 94%, at least 95%, at least 96%, at least 97%, at least 98%, at least 99% or 100% identity to SEQ ID NO:261; and a CDR3 comprising an amino acid sequence having at least 80%, at least 85%, at least 90%, at least 91%, at least 92%, at least 93%, at least 94%, at least 95%, at least 96%, at least 97%, at least 98%, at least 99% or 100% identity to SEQ ID NO:262; (v) VL2 and VL3 comprise a CDR1 comprising an amino acid sequence having at least 80%, at least 85%, at least 90%, at least 91%, at least 92%, at least 93%, at least 94%, at least 95%, at least 96%, at least 97%, at least 98%, at least 99% or 100% identity to SEQ ID NO:276; a CDR2 comprising an amino acid sequence having at least 80%, at least 85%, at least 90%, at least 91%, at least 92%, at least 93%, at least 94%, at least 95%, at least 96%, at least 97%, at least 98%, at least 99% or 100% identity to SEQ ID NO:277 (having the sequence of LGS); and a CDR3 comprising an amino acid sequence having at least 80%, at least 85%, at least 90%, at least 91%, at least 92%, at least 93%, at least 94%, at least 95%, at least 96%, at least 97%, at least 98%, at least 99% or 100% identity to SEQ ID NO:278; and (vi) VL4 comprises a CDR1 comprising an amino acid sequence having at least 80%, at least 85%, at least 90%, at least 91%, at least 92%, at least 93%, at least 94%, at least 95%, at least 96%, at least 97%, at least 98%, at least 99% or 100% identity to SEQ ID NO:55; a CDR2 comprising an amino acid sequence having at least 80%, at least 85%, at least 90%, at least 91%, at least 92%, at least 93%, at least 94%, at least 95%, at least 96%, at least 97%, at least 98%, at least 99% or 100% identity to SEQ ID NO:56 (having the sequence of GTN); and a CDR3 comprising an amino acid sequence having at least 80%, at least 85%, at least 90%, at least 91%, at least 92%, at least 93%, at least 94%, at least 95%, at least 96%, at least 97%, at least 98%, at least 99% or 100% identity to SEQ ID NO:57. In some aspects, (i) VH1 comprises a CDR1 comprising the amino acid sequence of SEQ ID NO:264; a CDR2 comprising the amino acid sequence of SEQ ID NO:265; and a CDR3 comprising the amino acid sequence of SEQ ID NO:266; (ii) VH2 and VH3 comprise a CDR1 comprising the amino acid sequence of SEQ ID NO:280; a CDR2 comprising the amino acid sequence of SEQ ID NO:281; and a CDR3 comprising the amino acid sequence of SEQ ID NO:282; (iii) VH4 comprises a CDR1 comprising the amino acid sequence of SEQ ID NO:59; a CDR2 comprising the amino acid sequence of SEQ ID NO:60; and a CDR3 comprising the amino acid sequence of SEQ ID NO:61; (iv) VL1 comprises a CDR1 comprising the amino acid sequence of SEQ ID NO:260; a CDR2 comprising the amino acid sequence of SEQ ID NO:261; and a CDR3 comprising the amino acid sequence of SEQ ID NO:262; (v) VL2 and VL3 comprise a CDR1 comprising the amino acid sequence of SEQ ID NO:276; a CDR2 comprising the amino acid sequence of SEQ ID NO:277 (having the sequence of LGS); and a CDR3 comprising the amino acid sequence of SEQ ID NO:278; and (vi) VL4 comprises a CDR1 comprising the amino acid sequence of SEQ ID NO:55; a CDR2 comprising the amino acid sequence of SEQ ID NO:56 (having the sequence of GTN); and a CDR3 comprising the amino acid sequence of SEQ ID NO:57. In some aspects, L1-L16 comprise the amino acid sequence of any one of SEQ ID NOs:1-34, wherein SEQ ID NO:1 has the amino acid sequence of G, SEQ ID NO:2 has the amino acid sequence of A, SEQ ID NO:3 has the amino acid sequence of GSS and SEQ ID NO:4 has the amino acid sequence of ASG. In some aspects, L1 or L4 and L7 or L10 comprise the amino acid sequence of SEQ ID NO:6; L2 or L5 and L8 or L11 comprise the amino acid sequence of SEQ ID NO:27; and L3 or L6 and L9 or L12 comprise the amino acid sequence of SEQ ID NO:6. In some aspects, L1 or L5 and L9 or L13 comprise the amino acid sequence of SEQ ID NO:6; L2 or L6 and L10 or L14 comprise the amino acid sequence of SEQ ID NO:27; L3 or L7 and L11 or L15 comprise the amino acid sequence of SEQ ID NO:6; and L4 or L8 and L12 or L16 comprise the amino acid sequence of SEQ ID NO:12. In some aspects, Fc comprises a knob-into-hole modification or Fc effector function knockout mutation. In some aspects, Fc comprises an amino acid sequence having at least 80%, at least 85%, at least 90%, at least 91%, at least 92%, at least 93%, at least 94%, at least 95%, at least 96%, at least 97%, at least 98%, at least 99%, or 100% identity to SEQ ID NO:293 or 294. In some aspects, Fc comprises the amino acid sequence of SEQ ID NO:293 or 294. In some preferred aspects, CDR1, CDR2 and CDR3 of each of VH1, VH2, VH3, VH4, VL1, VL2, VL3 and VL4 have at least 90% identity with the corresponding amino acid sequences specified above, optionally with (i) an Fc having at least 90% identity with the corresponding amino acid sequence recited above; and/or (ii) one or more linker sequence as specified above. In some particularly preferred aspects, CDR1, CDR2 and CDR3 of each of VH1, VH2, VH3, VH4, VL1, VL2, VL3 and VL4 comprise or consist of the corresponding amino acid sequences specified above, optionally with (i) an Fc comprising or consisting of the corresponding amino acid sequence recited above; and/or (ii) one or more linker sequence as specified above.

[0661] In some aspects, (i) VH1 and VH3 comprise a CDR1 comprising an amino acid sequence having at least 80%, at least 85%, at least 90%, at least 91%, at least 92%, at least 93%, at least 94%, at least 95%, at least 96%, at least 97%, at least 98%, at least 99% or 100% identity to SEQ ID NO:280; a CDR2 comprising an amino acid sequence having at least 80%, at least 85%, at least 90%, at least 91%, at least 92%, at least 93%, at least 94%, at least 95%, at least 96%, at least 97%, at least 98%, at least 99% or 100% identity to SEQ ID NO:281; and a CDR3 comprising an amino acid sequence having at least 80%, at least 85%, at least 90%, at least 91%, at least 92%, at least 93%, at least 94%, at least 95%, at least 96%, at least 97%, at least 98%, at least 99% or 100% identity to SEQ ID NO:282; (ii) VH2 comprises a CDR1 comprising an amino acid sequence having at least 80%, at least 85%, at least 90%, at least 91%, at least 92%, at least 93%, at least 94%, at least 95%, at least 96%, at least 97%, at least 98%, at least 99% or 100% identity to SEQ ID NO:264; a CDR2 comprising an amino acid sequence having at least 80%, at least 85%, at least 90%, at least 91%, at least 92%, at least 93%, at least 94%, at least 95%, at least 96%, at least 97%, at least 98%, at least 99% or 100% identity to SEQ ID NO:265; and a CDR3 comprising an amino acid sequence having at least 80%, at least 85%, at least 90%, at least 91%, at least 92%, at least 93%, at least 94%, at least 95%, at least 96%, at least 97%, at least 98%, at least 99% or 100% identity to SEQ ID NO:266; (iii) VH4 comprises a CDR1 comprising an amino acid sequence having at least 80%, at least 85%, at least 90%, at least 91%, at least 92%, at least 93%, at least 94%, at least 95%, at least 96%, at least 97%, at least 98%, at least 99% or 100% identity to SEQ ID NO:59; a CDR2 comprising an amino acid sequence having at least 80%, at least 85%, at least 90%, at least 91%, at least 92%, at least 93%, at least 94%, at least 95%, at least 96%, at least 97%, at least 98%, at least 99% or 100% identity to SEQ ID NO:60; and a CDR3 comprising an amino acid sequence having at least 80%, at least 85%, at least 90%, at least 91%, at least 92%, at least 93%, at least 94%, at least 95%, at least 96%, at least 97%, at least 98%, at least 99% or 100% identity to SEQ ID NO:61; (iv) VL1 and VL3 comprise a CDR1 comprising an amino acid sequence having at least 80%, at least 85%, at least 90%, at least 91%, at least 92%, at least 93%, at least 94%, at least 95%, at least 96%, at least 97%, at least 98%, at least 99% or 100% identity to SEQ ID NO:276; a CDR2 comprising an amino acid sequence having at least 80%, at least 85%, at least 90%, at least 91%, at least 92%, at least 93%, at least 94%, at least 95%, at least 96%, at least 97%, at least 98%, at least 99% or 100% identity to SEQ ID NO:277 (having the sequence of LGS); and a CDR3 comprising an amino acid sequence having at least 80%, at least 85%, at least 90%, at least 91%, at least 92%, at least 93%, at least 94%, at least 95%, at least 96%, at least 97%, at least 98%, at least 99% or 100% identity to SEQ ID NO:278; (v) VL2 comprises a CDR1 comprising an amino acid sequence having at least 80%, at least 85%, at least 90%, at least 91%, at least 92%, at least 93%, at least 94%, at least 95%, at least 96%, at least 97%, at least 98%, at least 99% or 100% identity to SEQ ID NO:260; a CDR2 comprising an amino acid sequence having at least 80%, at least 85%, at least 90%, at least 91%, at least 92%, at least 93%, at least 94%, at least 95%, at least 96%, at least 97%, at least 98%, at least 99% or 100% identity to SEQ ID NO:261; and a CDR3 comprising an amino acid sequence having at least 80%, at least 85%, at least 90%, at least 91%, at least 92%, at least 93%, at least 94%, at least 95%, at least 96%, at least 97%, at least 98%, at least 99% or 100% identity to SEQ ID NO:262; and (vi) VL4 comprises a CDR1 comprising an amino acid sequence having at least 80%, at least 85%, at least 90%, at least 91%, at least 92%, at least 93%, at least 94%, at least 95%, at least 96%, at least 97%, at least 98%, at least 99% or 100% identity to SEQ ID NO:55; a CDR2 comprising an amino acid sequence having at least 80%, at least 85%, at least 90%, at least 91%, at least 92%, at least 93%, at least 94%, at least 95%, at least 96%, at least 97%, at least 98%, at least 99% or 100% identity to SEQ ID NO:56 (having the sequence of GTN); and a CDR3 comprising an amino acid sequence having at least 80%, at least 85%, at least 90%, at least 91%, at least 92%, at least 93%, at least 94%, at least 95%, at least 96%, at least 97%, at least 98%, at least 99% or 100% identity to SEQ ID NO:57. In some aspects, (i) VH1 and VH3 comprise a CDR1 comprising the amino acid sequence of SEQ ID NO:280; a CDR2 comprising the amino acid sequence of SEQ ID NO:281; and a CDR3 comprising the amino acid sequence of SEQ ID NO:282; (ii) VH2 comprises a CDR1 comprising the amino acid sequence of SEQ ID NO:264; a CDR2 comprising the amino acid sequence of SEQ ID NO:265; and a CDR3 comprising the amino acid sequence of SEQ ID NO:266; (iii) VH4 comprises a CDR1 comprising the amino acid sequence of SEQ ID NO:59; a CDR2 comprising the amino acid sequence of SEQ ID NO:60; and a CDR3 comprising the amino acid sequence of SEQ ID NO:61; (iv) VL1 and VL3 comprise a CDR1 comprising the amino acid sequence of SEQ ID NO:276; a CDR2 comprising the amino acid sequence of SEQ ID NO:277 (having the sequence of LGS); and a CDR3 comprising the amino acid sequence of SEQ ID NO:278; (v) VL2 comprises a CDR1 comprising the amino acid sequence of SEQ ID NO:260; a CDR2 comprising the amino acid sequence of SEQ ID NO:261; and a CDR3 comprising the amino acid sequence of SEQ ID NO:262; and (vi) VL4 comprises a CDR1 comprising the amino acid sequence of SEQ ID NO:55; a CDR2 comprising the amino acid sequence of SEQ ID NO:56 (having the sequence of GTN); and a CDR3 comprising the amino acid sequence of SEQ ID NO:57. In some aspects, L1-L16 comprise the amino acid sequence of any one of SEQ ID NOs:1-34, wherein SEQ ID NO:1 has the amino acid sequence of G, SEQ ID NO:2 has the amino acid sequence of A, SEQ ID NO:3 has the amino acid sequence of GSS and SEQ ID NO:4 has the amino acid sequence of ASG. In some aspects, L1 or L4 and L7 or L10 comprise the amino acid sequence of SEQ ID NO:6; L2 or L5 and L8 or L11 comprise the amino acid sequence of SEQ ID NO:27; and L3 or L6 and L9 or L12 comprise the amino acid sequence of SEQ ID NO:6. In some aspects, L1 or L5 and L9 or L13 comprise the amino acid sequence of SEQ ID NO:6; L2 or L6 and L10 or L14 comprise the amino acid sequence of SEQ ID NO:27; L3 or L7 and L11 or L15 comprise the amino acid sequence of SEQ ID NO:6; and L4 or L8 and L12 or L16 comprise the amino acid sequence of SEQ ID NO:12. In some aspects, Fc comprises a knob-into-hole modification or Fc effector function knockout mutation. In some aspects, Fc comprises an amino acid sequence having at least 80%, at least 85%, at least 90%, at least 91%, at least 92%, at least 93%, at least 94%, at least 95%, at least 96%, at least 97%, at least 98%, at least 99%, or 100% identity to SEQ ID NO:293 or 294. In some aspects, Fc comprises the amino acid sequence of SEQ ID NO:293 or 294. In some preferred aspects, CDR1, CDR2 and CDR3 of each of VH1, VH2, VH3, VH4, VL1, VL2, VL3 and VL4 have at least 90% identity with the corresponding amino acid sequences specified above, optionally with (i) an Fc having at least 90% identity with the corresponding amino acid sequence recited above; and/or (ii) one or more linker sequence as specified above. In some particularly preferred aspects, CDR1, CDR2 and CDR3 of each of VH1, VH2, VH3, VH4, VL1, VL2, VL3 and VL4 comprise or consist of the corresponding amino acid sequences specified above, optionally with (i) an Fc comprising or consisting of the corresponding amino acid sequence recited above; and/or (ii) one or more linker sequence as specified above.

[0662] In some aspects, (i) VH1 comprises a CDR1 comprising an amino acid sequence having at least 80%, at least 85%, at least 90%, at least 91%, at least 92%, at least 93%, at least 94%, at least 95%, at least 96%, at least 97%, at least 98%, at least 99% or 100% identity to SEQ ID NO:59; a CDR2 comprising an amino acid sequence having at least 80%, at least 85%, at least 90%, at least 91%, at least 92%, at least 93%, at least 94%, at least 95%, at least 96%, at least 97%, at least 98%, at least 99% or 100% identity to SEQ ID NO:60; and a CDR3 comprising an amino acid sequence having at least 80%, at least 85%, at least 90%, at least 91%, at least 92%, at least 93%, at least 94%, at least 95%, at least 96%, at least 97%, at least 98%, at least 99% or 100% identity to SEQ ID NO:61; (ii) VH2 and VH4 comprise a CDR1 comprising an amino acid sequence having at least 80%, at least 85%, at least 90%, at least 91%, at least 92%, at least 93%, at least 94%, at least 95%, at least 96%, at least 97%, at least 98%, at least 99% or 100% identity to SEQ ID NO:280; a CDR2 comprising an amino acid sequence having at least 80%, at least 85%, at least 90%, at least 91%, at least 92%, at least 93%, at least 94%, at least 95%, at least 96%, at least 97%, at least 98%, at least 99% or 100% identity to SEQ ID NO:281; and a CDR3 comprising an amino acid sequence having at least 80%, at least 85%, at least 90%, at least 91%, at least 92%, at least 93%, at least 94%, at least 95%, at least 96%, at least 97%, at least 98%, at least 99% or 100% identity to SEQ ID NO:282; (iii) VH3 comprises a CDR1 comprising an amino acid sequence having at least 80%, at least 85%, at least 90%, at least 91%, at least 92%, at least 93%, at least 94%, at least 95%, at least 96%, at least 97%, at least 98%, at least 99% or 100% identity to SEQ ID NO:264; a CDR2 comprising an amino acid sequence having at least 80%, at least 85%, at least 90%, at least 91%, at least 92%, at least 93%, at least 94%, at least 95%, at least 96%, at least 97%, at least 98%, at least 99% or 100% identity to SEQ ID NO:265; and a CDR3 comprising an amino acid sequence having at least 80%, at least 85%, at least 90%, at least 91%, at least 92%, at least 93%, at least 94%, at least 95%, at least 96%, at least 97%, at least 98%, at least 99% or 100% identity to SEQ ID NO:266; (iv) VL1 comprises a CDR1 comprising an amino acid sequence having at least 80%, at least 85%, at least 90%, at least 91%, at least 92%, at least 93%, at least 94%, at least 95%, at least 96%, at least 97%, at least 98%, at least 99% or 100% identity to SEQ ID NO:55; a CDR2 comprising an amino acid sequence having at least 80%, at least 85%, at least 90%, at least 91%, at least 92%, at least 93%, at least 94%, at least 95%, at least 96%, at least 97%, at least 98%, at least 99% or 100% identity to SEQ ID NO:56 (having the sequence of GTN); and a CDR3 comprising an amino acid sequence having at least 80%, at least 85%, at least 90%, at least 91%, at least 92%, at least 93%, at least 94%, at least 95%, at least 96%, at least 97%, at least 98%, at least 99% or 100% identity to SEQ ID NO:57; (v) VL2 and VL4 comprise a CDR1 comprising an amino acid sequence having at least 80%, at least 85%, at least 90%, at least 91%, at least 92%, at least 93%, at least 94%, at least 95%, at least 96%, at least 97%, at least 98%, at least 99% or 100% identity to SEQ ID NO:276; a CDR2 comprising an amino acid sequence having at least 80%, at least 85%, at least 90%, at least 91%, at least 92%, at least 93%, at least 94%, at least 95%, at least 96%, at least 97%, at least 98%, at least 99% or 100% identity to SEQ ID NO:277 (having the sequence of LGS); and a CDR3 comprising an amino acid sequence having at least 80%, at least 85%, at least 90%, at least 91%, at least 92%, at least 93%, at least 94%, at least 95%, at least 96%, at least 97%, at least 98%, at least 99% or 100% identity to SEQ ID NO:278; and (vi) VL3 comprises a CDR1 comprising an amino acid sequence having at least 80%, at least 85%, at least 90%, at least 91%, at least 92%, at least 93%, at least 94%, at least 95%, at least 96%, at least 97%, at least 98%, at least 99% or 100% identity to SEQ ID NO:260; a CDR2 comprising an amino acid sequence having at least 80%, at least 85%, at least 90%, at least 91%, at least 92%, at least 93%, at least 94%, at least 95%, at least 96%, at least 97%, at least 98%, at least 99% or 100% identity to SEQ ID NO:261; and a CDR3 comprising an amino acid sequence having at least 80%, at least 85%, at least 90%, at least 91%, at least 92%, at least 93%, at least 94%, at least 95%, at least 96%, at least 97%, at least 98%, at least 99% or 100% identity to SEQ ID NO:262. In some aspects, (i) VH1 comprises a CDR1 comprising the amino acid sequence of SEQ ID NO:59; a CDR2 comprising the amino acid sequence of SEQ ID NO:60; and a CDR3 comprising the amino acid sequence of SEQ ID NO:61; (ii) VH2 and VH4 comprise a CDR1 comprising the amino acid sequence of SEQ ID NO:280; a CDR2 comprising the amino acid sequence of SEQ ID NO:281; and a CDR3 comprising the amino acid sequence of SEQ ID NO:282; (iii) VH3 comprises a CDR1 comprising the amino acid sequence of SEQ ID NO:264; a CDR2 comprising the amino acid sequence of SEQ ID NO:265; and a CDR3 comprising the amino acid sequence of SEQ ID NO:266; (iv) VL1 comprises a CDR1 comprising the amino acid sequence of SEQ ID NO:55; a CDR2 comprising the amino acid sequence of SEQ ID NO:56 (having the sequence of GTN); and a CDR3 comprising the amino acid sequence of SEQ ID NO:57; (v) VL2 and VL4 comprise a CDR1 comprising the amino acid sequence of SEQ ID NO:276; a CDR2 comprising the amino acid sequence of SEQ ID NO:277 (having the sequence of LGS); and a CDR3 comprising the amino acid sequence of SEQ ID NO:278; and (vi) VL3 comprises a CDR1 comprising the amino acid sequence of SEQ ID NO:260; a CDR2 comprising the amino acid sequence of SEQ ID NO:261; and a CDR3 comprising the amino acid sequence of SEQ ID NO:262. In some aspects, L1-L16 comprise the amino acid sequence of any one of SEQ ID NOs:1-34, wherein SEQ ID NO:1 has the amino acid sequence of G, SEQ ID NO:2 has the amino acid sequence of A, SEQ ID NO:3 has the amino acid sequence of GSS and SEQ ID NO:4 has the amino acid sequence of ASG. In some aspects, L1 or L4 and L7 or L10 comprise the amino acid sequence of SEQ ID NO:6; L2 or L5 and L8 or L11 comprise the amino acid sequence of SEQ ID NO:27; and L3 or L6 and L9 or L12 comprise the amino acid sequence of SEQ ID NO:6. In some aspects, L1 or L5 and L9 or L13 comprise the amino acid sequence of SEQ ID NO:6; L2 or L6 and L10 or L14 comprise the amino acid sequence of SEQ ID NO:27; L3 or L7 and L11 or L15 comprise the amino acid sequence of SEQ ID NO:6; and L4 or L8 and L12 or L16 comprise the amino acid sequence of SEQ ID NO:12. In some aspects, Fc comprises a knob-into-hole modification or Fc effector function knockout mutation. In some aspects, Fc comprises an amino acid sequence having at least 80%, at least 85%, at least 90%, at least 91%, at least 92%, at least 93%, at least 94%, at least 95%, at least 96%, at least 97%, at least 98%, at least 99%, or 100% identity to SEQ ID NO:293 or 294. In some aspects, Fc comprises the amino acid sequence of SEQ ID NO:293 or 294. In some preferred aspects, CDR1, CDR2 and CDR3 of each of VH1, VH2, VH3, VH4, VL1, VL2, VL3 and VL4 have at least 90% identity with the corresponding amino acid sequences specified above, optionally with (i) an Fc having at least 90% identity with the corresponding amino acid sequence recited above; and/or (ii) one or more linker sequence as specified above. In some particularly preferred aspects, CDR1, CDR2 and CDR3 of each of VH1, VH2, VH3, VH4, VL1, VL2, VL3 and VL4 comprise or consist of the corresponding amino acid sequences specified above, optionally with (i) an Fc comprising or consisting of the corresponding amino acid sequence recited above; and/or (ii) one or more linker sequence as specified above.

[0663] In some aspects, (i) VH1 comprises a CDR1 comprising an amino acid sequence having at least 80%, at least 85%, at least 90%, at least 91%, at least 92%, at least 93%, at least 94%, at least 95%, at least 96%, at least 97%, at least 98%, at least 99% or 100% identity to SEQ ID NO:59; a CDR2 comprising an amino acid sequence having at least 80%, at least 85%, at least 90%, at least 91%, at least 92%, at least 93%, at least 94%, at least 95%, at least 96%, at least 97%, at least 98%, at least 99% or 100% identity to SEQ ID NO:60; and a CDR3 comprising an amino acid sequence having at least 80%, at least 85%, at least 90%, at least 91%, at least 92%, at least 93%, at least 94%, at least 95%, at least 96%, at least 97%, at least 98%, at least 99% or 100% identity to SEQ ID NO:61; (ii) VH2 and VH3 comprise a CDR1 comprising an amino acid sequence having at least 80%, at least 85%, at least 90%, at least 91%, at least 92%, at least 93%, at least 94%, at least 95%, at least 96%, at least 97%, at least 98%, at least 99% or 100% identity to SEQ ID NO:280; a CDR2 comprising an amino acid sequence having at least 80%, at least 85%, at least 90%, at least 91%, at least 92%, at least 93%, at least 94%, at least 95%, at least 96%, at least 97%, at least 98%, at least 99% or 100% identity to SEQ ID NO:281; and a CDR3 comprising an amino acid sequence having at least 80%, at least 85%, at least 90%, at least 91%, at least 92%, at least 93%, at least 94%, at least 95%, at least 96%, at least 97%, at least 98%, at least 99% or 100% identity to SEQ ID NO:282; (iii) VH4 comprises a CDR1 comprising an amino acid sequence having at least 80%, at least 85%, at least 90%, at least 91%, at least 92%, at least 93%, at least 94%, at least 95%, at least 96%, at least 97%, at least 98%, at least 99% or 100% identity to SEQ ID NO:264; a CDR2 comprising an amino acid sequence having at least 80%, at least 85%, at least 90%, at least 91%, at least 92%, at least 93%, at least 94%, at least 95%, at least 96%, at least 97%, at least 98%, at least 99% or 100% identity to SEQ ID NO:265; and a CDR3 comprising an amino acid sequence having at least 80%, at least 85%, at least 90%, at least 91%, at least 92%, at least 93%, at least 94%, at least 95%, at least 96%, at least 97%, at least 98%, at least 99% or 100% identity to SEQ ID NO:266; (iv) VL1 comprises a CDR1 comprising an amino acid sequence having at least 80%, at least 85%, at least 90%, at least 91%, at least 92%, at least 93%, at least 94%, at least 95%, at least 96%, at least 97%, at least 98%, at least 99% or 100% identity to SEQ ID NO:55; a CDR2 comprising an amino acid sequence having at least 80%, at least 85%, at least 90%, at least 91%, at least 92%, at least 93%, at least 94%, at least 95%, at least 96%, at least 97%, at least 98%, at least 99% or 100% identity to SEQ ID NO:56 (having the sequence of GTN); and a CDR3 comprising an amino acid sequence having at least 80%, at least 85%, at least 90%, at least 91%, at least 92%, at least 93%, at least 94%, at least 95%, at least 96%, at least 97%, at least 98%, at least 99% or 100% identity to SEQ ID NO:57; (v) VL2 and VL3 comprise a CDR1 comprising an amino acid sequence having at least 80%, at least 85%, at least 90%, at least 91%, at least 92%, at least 93%, at least 94%, at least 95%, at least 96%, at least 97%, at least 98%, at least 99% or 100% identity to SEQ ID NO:276; a CDR2 comprising an amino acid sequence having at least 80%, at least 85%, at least 90%, at least 91%, at least 92%, at least 93%, at least 94%, at least 95%, at least 96%, at least 97%, at least 98%, at least 99% or 100% identity to SEQ ID NO:277 (having the sequence of LGS); and a CDR3 comprising an amino acid sequence having at least 80%, at least 85%, at least 90%, at least 91%, at least 92%, at least 93%, at least 94%, at least 95%, at least 96%, at least 97%, at least 98%, at least 99% or 100% identity to SEQ ID NO:278; and (vi) VL4 comprises a CDR1 comprising an amino acid sequence having at least 80%, at least 85%, at least 90%, at least 91%, at least 92%, at least 93%, at least 94%, at least 95%, at least 96%, at least 97%, at least 98%, at least 99% or 100% identity to SEQ ID NO:260; a CDR2 comprising an amino acid sequence having at least 80%, at least 85%, at least 90%, at least 91%, at least 92%, at least 93%, at least 94%, at least 95%, at least 96%, at least 97%, at least 98%, at least 99% or 100% identity to SEQ ID NO:261; and a CDR3 comprising an amino acid sequence having at least 80%, at least 85%, at least 90%, at least 91%, at least 92%, at least 93%, at least 94%, at least 95%, at least 96%, at least 97%, at least 98%, at least 99% or 100% identity to SEQ ID NO:262. In some aspects, (i) VH1 comprises a CDR1 comprising the amino acid sequence of SEQ ID NO:59; a CDR2 comprising the amino acid sequence of SEQ ID NO:60; and a CDR3 comprising the amino acid sequence of SEQ ID NO:61; (ii) VH2 and VH3 comprise a CDR1 comprising the amino acid sequence of SEQ ID NO:280; a CDR2 comprising the amino acid sequence of SEQ ID NO:281; and a CDR3 comprising the amino acid sequence of SEQ ID NO:282; (iii) VH4 comprises a CDR1 comprising the amino acid sequence of SEQ ID NO:264; a CDR2 comprising the amino acid sequence of SEQ ID NO:265; and a CDR3 comprising the amino acid sequence of SEQ ID NO:266; (iv) VL1 comprises a CDR1 comprising the amino acid sequence of SEQ ID NO:55; a CDR2 comprising the amino acid sequence of SEQ ID NO:56 (having the sequence of GTN); and a CDR3 comprising the amino acid sequence of SEQ ID NO:57; (v) VL2 and VL3 comprise a CDR1 comprising the amino acid sequence of SEQ ID NO:276; a CDR2 comprising the amino acid sequence of SEQ ID NO:277 (having the sequence of LGS); and a CDR3 comprising the amino acid sequence of SEQ ID NO:278; and (vi) VL4 comprises a CDR1 comprising the amino acid sequence of SEQ ID NO:260; a CDR2 comprising the amino acid sequence of SEQ ID NO:261; and a CDR3 comprising the amino acid sequence of SEQ ID NO:262. In some aspects, L1-L16 comprise the amino acid sequence of any one of SEQ ID NOs:1-34, wherein SEQ ID NO:1 has the amino acid sequence of G, SEQ ID NO:2 has the amino acid sequence of A, SEQ ID NO:3 has the amino acid sequence of GSS and SEQ ID NO:4 has the amino acid sequence of ASG. In some aspects, L1 or L4 and L7 or L10 comprise the amino acid sequence of SEQ ID NO:6; L2 or L5 and L8 or L11 comprise the amino acid sequence of SEQ ID NO:27; and L3 or L6 and L9 or L12 comprise the amino acid sequence of SEQ ID NO:6. In some aspects, L1 or L5 and L9 or L13 comprise the amino acid sequence of SEQ ID NO:6; L2 or L6 and L10 or L14 comprise the amino acid sequence of SEQ ID NO:27; L3 or L7 and L11 or L15 comprise the amino acid sequence of SEQ ID NO:6; and L4 or L8 and L12 or L16 comprise the amino acid sequence of SEQ ID NO:12. In some aspects, Fc comprises a knob-into-hole modification or Fc effector function knockout mutation. In some aspects, Fc comprises an amino acid sequence having at least 80%, at least 85%, at least 90%, at least 91%, at least 92%, at least 93%, at least 94%, at least 95%, at least 96%, at least 97%, at least 98%, at least 99%, or 100% identity to SEQ ID NO:293 or 294. In some aspects, Fc comprises the amino acid sequence of SEQ ID NO:293 or 294. In some preferred aspects, CDR1, CDR2 and CDR3 of each of VH1, VH2, VH3, VH4, VL1, VL2, VL3 and VL4 have at least 90% identity with the corresponding amino acid sequences specified above, optionally with (i) an Fc having at least 90% identity with the corresponding amino acid sequence recited above; and/or (ii) one or more linker sequence as specified above. In some particularly preferred aspects, CDR1, CDR2 and CDR3 of each of VH1, VH2, VH3, VH4, VL1, VL2, VL3 and VL4 comprise or consist of the corresponding amino acid sequences specified above, optionally with (i) an Fc comprising or consisting of the corresponding amino acid sequence recited above; and/or (ii) one or more linker sequence as specified above.

[0664] In some aspects, (i) VH1 comprises a CDR1 comprising an amino acid sequence having at least 80%, at least 85%, at least 90%, at least 91%, at least 92%, at least 93%, at least 94%, at least 95%, at least 96%, at least 97%, at least 98%, at least 99% or 100% identity to SEQ ID NO:59; a CDR2 comprising an amino acid sequence having at least 80%, at least 85%, at least 90%, at least 91%, at least 92%, at least 93%, at least 94%, at least 95%, at least 96%, at least 97%, at least 98%, at least 99% or 100% identity to SEQ ID NO:60; and a CDR3 comprising an amino acid sequence having at least 80%, at least 85%, at least 90%, at least 91%, at least 92%, at least 93%, at least 94%, at least 95%, at least 96%, at least 97%, at least 98%, at least 99% or 100% identity to SEQ ID NO:61; (ii) VH2 and VH3 comprise a CDR1 comprising an amino acid sequence having at least 80%, at least 85%, at least 90%, at least 91%, at least 92%, at least 93%, at least 94%, at least 95%, at least 96%, at least 97%, at least 98%, at least 99% or 100% identity to SEQ ID NO:272; a CDR2 comprising an amino acid sequence having at least 80%, at least 85%, at least 90%, at least 91%, at least 92%, at least 93%, at least 94%, at least 95%, at least 96%, at least 97%, at least 98%, at least 99% or 100% identity to SEQ ID NO:273; and a CDR3 comprising an amino acid sequence having at least 80%, at least 85%, at least 90%, at least 91%, at least 92%, at least 93%, at least 94%, at least 95%, at least 96%, at least 97%, at least 98%, at least 99% or 100% identity to SEQ ID NO:274; (iii) VH4 comprises a CDR1 comprising an amino acid sequence having at least 80%, at least 85%, at least 90%, at least 91%, at least 92%, at least 93%, at least 94%, at least 95%, at least 96%, at least 97%, at least 98%, at least 99% or 100% identity to SEQ ID NO:280; a CDR2 comprising an amino acid sequence having at least 80%, at least 85%, at least 90%, at least 91%, at least 92%, at least 93%, at least 94%, at least 95%, at least 96%, at least 97%, at least 98%, at least 99% or 100% identity to SEQ ID NO:281; and a CDR3 comprising an amino acid sequence having at least 80%, at least 85%, at least 90%, at least 91%, at least 92%, at least 93%, at least 94%, at least 95%, at least 96%, at least 97%, at least 98%, at least 99% or 100% identity to SEQ ID NO:282; (iv) VL1 comprises a CDR1 comprising an amino acid sequence having at least 80%, at least 85%, at least 90%, at least 91%, at least 92%, at least 93%, at least 94%, at least 95%, at least 96%, at least 97%, at least 98%, at least 99% or 100% identity to SEQ ID NO:55; a CDR2 comprising an amino acid sequence having at least 80%, at least 85%, at least 90%, at least 91%, at least 92%, at least 93%, at least 94%, at least 95%, at least 96%, at least 97%, at least 98%, at least 99% or 100% identity to SEQ ID NO:56 (having the sequence of GTN); and a CDR3 comprising an amino acid sequence having at least 80%, at least 85%, at least 90%, at least 91%, at least 92%, at least 93%, at least 94%, at least 95%, at least 96%, at least 97%, at least 98%, at least 99% or 100% identity to SEQ ID NO:57; (v) VL2 and VL3 comprise a CDR1 comprising an amino acid sequence having at least 80%, at least 85%, at least 90%, at least 91%, at least 92%, at least 93%, at least 94%, at least 95%, at least 96%, at least 97%, at least 98%, at least 99% or 100% identity to SEQ ID NO:268; a CDR2 comprising an amino acid sequence having at least 80%, at least 85%, at least 90%, at least 91%, at least 92%, at least 93%, at least 94%, at least 95%, at least 96%, at least 97%, at least 98%, at least 99% or 100% identity to SEQ ID NO:269 (having the sequence of GAS); and a CDR3 comprising an amino acid sequence having at least 80%, at least 85%, at least 90%, at least 91%, at least 92%, at least 93%, at least 94%, at least 95%, at least 96%, at least 97%, at least 98%, at least 99% or 100% identity to SEQ ID NO:270; and (vi) VL4 comprises a CDR1 comprising an amino acid sequence having at least 80%, at least 85%, at least 90%, at least 91%, at least 92%, at least 93%, at least 94%, at least 95%, at least 96%, at least 97%, at least 98%, at least 99% or 100% identity to SEQ ID NO:276; a CDR2 comprising an amino acid sequence having at least 80%, at least 85%, at least 90%, at least 91%, at least 92%, at least 93%, at least 94%, at least 95%, at least 96%, at least 97%, at least 98%, at least 99% or 100% identity to SEQ ID NO:277 (having the sequence of LGS); and a CDR3 comprising an amino acid sequence having at least 80%, at least 85%, at least 90%, at least 91%, at least 92%, at least 93%, at least 94%, at least 95%, at least 96%, at least 97%, at least 98%, at least 99% or 100% identity to SEQ ID NO:278. In some aspects, (i) VH1 comprises a CDR1 comprising the amino acid sequence of SEQ ID NO:59; a CDR2 comprising the amino acid sequence of SEQ ID NO:60; and a CDR3 comprising the amino acid sequence of SEQ ID NO:61; (ii) VH2 and VH3 comprise a CDR1 comprising the amino acid sequence of SEQ ID NO:272; a CDR2 comprising the amino acid sequence of SEQ ID NO:273; and a CDR3 comprising the amino acid sequence of SEQ ID NO:274; (iii) VH4 comprises a CDR1 comprising the amino acid sequence of SEQ ID NO:280; a CDR2 comprising the amino acid sequence of SEQ ID NO:281; and a CDR3 comprising the amino acid sequence of SEQ ID NO:282; (iv) VL1 comprises a CDR1 comprising the amino acid sequence of SEQ ID NO:55; a CDR2 comprising the amino acid sequence of SEQ ID NO:56 (having the sequence of GTN); and a CDR3 comprising the amino acid sequence of SEQ ID NO:57; (v) VL2 and VL3 comprise a CDR1 comprising the amino acid sequence of SEQ ID NO:268; a CDR2 comprising the amino acid sequence of SEQ ID NO:269 (having the sequence of GAS); and a CDR3 comprising the amino acid sequence of SEQ ID NO:270; and (vi) VL4 comprises a CDR1 comprising the amino acid sequence of SEQ ID NO:276; a CDR2 comprising the amino acid sequence of SEQ ID NO:277 (having the sequence of LGS); and a CDR3 comprising the amino acid sequence of SEQ ID NO:278. In some aspects, L1-L16 comprise the amino acid sequence of any one of SEQ ID NOs:1-34, wherein SEQ ID NO:1 has the amino acid sequence of G, SEQ ID NO:2 has the amino acid sequence of A, SEQ ID NO:3 has the amino acid sequence of GSS and SEQ ID NO:4 has the amino acid sequence of ASG. In some aspects, L1 or L4 and L7 or L10 comprise the amino acid sequence of SEQ ID NO:6; L2 or L5 and L8 or L11 comprise the amino acid sequence of SEQ ID NO:27; and L3 or L6 and L9 or L12 comprise the amino acid sequence of SEQ ID NO:6. In some aspects, L1 or L5 and L9 or L13 comprise the amino acid sequence of SEQ ID NO:6; L2 or L6 and L10 or L14 comprise the amino acid sequence of SEQ ID NO:27; L3 or L7 and L11 or L15 comprise the amino acid sequence of SEQ ID NO:6; and L4 or L8 and L12 or L16 comprise the amino acid sequence of SEQ ID NO:12. In some aspects, Fc comprises a knob-into-hole modification or Fc effector function knockout mutation. In some aspects, Fc comprises an amino acid sequence having at least 80%, at least 85%, at least 90%, at least 91%, at least 92%, at least 93%, at least 94%, at least 95%, at least 96%, at least 97%, at least 98%, at least 99%, or 100% identity to SEQ ID NO:293 or 294. In some aspects, Fc comprises the amino acid sequence of SEQ ID NO:293 or 294. In some preferred aspects, CDR1, CDR2 and CDR3 of each of VH1, VH2, VH3, VH4, VL1, VL2, VL3 and VL4 have at least 90% identity with the corresponding amino acid sequences specified above, optionally with (i) an Fc having at least 90% identity with the corresponding amino acid sequence recited above; and/or (ii) one or more linker sequence as specified above. In some particularly preferred aspects, CDR1, CDR2 and CDR3 of each of VH1, VH2, VH3, VH4, VL1, VL2, VL3 and VL4 comprise or consist of the corresponding amino acid sequences specified above, optionally with (i) an Fc comprising or consisting of the corresponding amino acid sequence recited above; and/or (ii) one or more linker sequence as specified above.

[0665] In some aspects, (i) VH1 comprises a CDR1 comprising an amino acid sequence having at least 80%, at least 85%, at least 90%, at least 91%, at least 92%, at least 93%, at least 94%, at least 95%, at least 96%, at least 97%, at least 98%, at least 99% or 100% identity to SEQ ID NO:59; a CDR2 comprising an amino acid sequence having at least 80%, at least 85%, at least 90%, at least 91%, at least 92%, at least 93%, at least 94%, at least 95%, at least 96%, at least 97%, at least 98%, at least 99% or 100% identity to SEQ ID NO:60; and a CDR3 comprising an amino acid sequence having at least 80%, at least 85%, at least 90%, at least 91%, at least 92%, at least 93%, at least 94%, at least 95%, at least 96%, at least 97%, at least 98%, at least 99% or 100% identity to SEQ ID NO:61; (ii) VH2 and VH4 comprise a CDR1 comprising an amino acid sequence having at least 80%, at least 85%, at least 90%, at least 91%, at least 92%, at least 93%, at least 94%, at least 95%, at least 96%, at least 97%, at least 98%, at least 99% or 100% identity to SEQ ID NO:272; a CDR2 comprising an amino acid sequence having at least 80%, at least 85%, at least 90%, at least 91%, at least 92%, at least 93%, at least 94%, at least 95%, at least 96%, at least 97%, at least 98%, at least 99% or 100% identity to SEQ ID NO:273; and a CDR3 comprising an amino acid sequence having at least 80%, at least 85%, at least 90%, at least 91%, at least 92%, at least 93%, at least 94%, at least 95%, at least 96%, at least 97%, at least 98%, at least 99% or 100% identity to SEQ ID NO:274; (iii) VH3 comprises a CDR1 comprising an amino acid sequence having at least 80%, at least 85%, at least 90%, at least 91%, at least 92%, at least 93%, at least 94%, at least 95%, at least 96%, at least 97%, at least 98%, at least 99% or 100% identity to SEQ ID NO:280; a CDR2 comprising an amino acid sequence having at least 80%, at least 85%, at least 90%, at least 91%, at least 92%, at least 93%, at least 94%, at least 95%, at least 96%, at least 97%, at least 98%, at least 99% or 100% identity to SEQ ID NO:281; and a CDR3 comprising an amino acid sequence having at least 80%, at least 85%, at least 90%, at least 91%, at least 92%, at least 93%, at least 94%, at least 95%, at least 96%, at least 97%, at least 98%, at least 99% or 100% identity to SEQ ID NO:282; (iv) VL1 comprises a CDR1 comprising an amino acid sequence having at least 80%, at least 85%, at least 90%, at least 91%, at least 92%, at least 93%, at least 94%, at least 95%, at least 96%, at least 97%, at least 98%, at least 99% or 100% identity to SEQ ID NO:55; a CDR2 comprising an amino acid sequence having at least 80%, at least 85%, at least 90%, at least 91%, at least 92%, at least 93%, at least 94%, at least 95%, at least 96%, at least 97%, at least 98%, at least 99% or 100% identity to SEQ ID NO:56 (having the sequence of GTN); and a CDR3 comprising an amino acid sequence having at least 80%, at least 85%, at least 90%, at least 91%, at least 92%, at least 93%, at least 94%, at least 95%, at least 96%, at least 97%, at least 98%, at least 99% or 100% identity to SEQ ID NO:57; (v) VL2 and VL4 comprise a CDR1 comprising an amino acid sequence having at least 80%, at least 85%, at least 90%, at least 91%, at least 92%, at least 93%, at least 94%, at least 95%, at least 96%, at least 97%, at least 98%, at least 99% or 100% identity to SEQ ID NO:268; a CDR2 comprising an amino acid sequence having at least 80%, at least 85%, at least 90%, at least 91%, at least 92%, at least 93%, at least 94%, at least 95%, at least 96%, at least 97%, at least 98%, at least 99% or 100% identity to SEQ ID NO:269 (having the sequence of GAS); and a CDR3 comprising an amino acid sequence having at least 80%, at least 85%, at least 90%, at least 91%, at least 92%, at least 93%, at least 94%, at least 95%, at least 96%, at least 97%, at least 98%, at least 99% or 100% identity to SEQ ID NO:270; and (vi) VL3 comprises a CDR1 comprising an amino acid sequence having at least 80%, at least 85%, at least 90%, at least 91%, at least 92%, at least 93%, at least 94%, at least 95%, at least 96%, at least 97%, at least 98%, at least 99% or 100% identity to SEQ ID NO:276; a CDR2 comprising an amino acid sequence having at least 80%, at least 85%, at least 90%, at least 91%, at least 92%, at least 93%, at least 94%, at least 95%, at least 96%, at least 97%, at least 98%, at least 99% or 100% identity to SEQ ID NO:277 (having the sequence of LGS); and a CDR3 comprising an amino acid sequence having at least 80%, at least 85%, at least 90%, at least 91%, at least 92%, at least 93%, at least 94%, at least 95%, at least 96%, at least 97%, at least 98%, at least 99% or 100% identity to SEQ ID NO:278. In some aspects, (i) VH1 comprises a CDR1 comprising the amino acid sequence of SEQ ID NO:59; a CDR2 comprising the amino acid sequence of SEQ ID NO:60; and a CDR3 comprising the amino acid sequence of SEQ ID NO:61; (ii) VH2 and VH4 comprise a CDR1 comprising the amino acid sequence of SEQ ID NO:272; a CDR2 comprising the amino acid sequence of SEQ ID NO:273; and a CDR3 comprising the amino acid sequence of SEQ ID NO:274; (iii) VH3 comprises a CDR1 comprising the amino acid sequence of SEQ ID NO:280; a CDR2 comprising the amino acid sequence of SEQ ID NO:281; and a CDR3 comprising the amino acid sequence of SEQ ID NO:282; (iv) VL1 comprises a CDR1 comprising the amino acid sequence of SEQ ID NO:55; a CDR2 comprising the amino acid sequence of SEQ ID NO:56 (having the sequence of GTN); and a CDR3 comprising the amino acid sequence of SEQ ID NO:57; (v) VL2 and VL4 comprise a CDR1 comprising the amino acid sequence of SEQ ID NO:268; a CDR2 comprising the amino acid sequence of SEQ ID NO:269 (having the sequence of GAS); and a CDR3 comprising the amino acid sequence of SEQ ID NO:270; and (vi) VL3 comprises a CDR1 comprising the amino acid sequence of SEQ ID NO:276; a CDR2 comprising the amino acid sequence of SEQ ID NO:277 (having the sequence of LGS); and a CDR3 comprising the amino acid sequence of SEQ ID NO:278. In some aspects, L1-L16 comprise the amino acid sequence of any one of SEQ ID NOs:1-34, wherein SEQ ID NO:1 has the amino acid sequence of G, SEQ ID NO:2 has the amino acid sequence of A, SEQ ID NO:3 has the amino acid sequence of GSS and SEQ ID NO:4 has the amino acid sequence of ASG. In some aspects, L1 or L4 and L7 or L10 comprise the amino acid sequence of SEQ ID NO:6; L2 or L5 and L8 or L11 comprise the amino acid sequence of SEQ ID NO: 27; and L3 or L6 and L9 or L12 comprise the amino acid sequence of SEQ ID NO:6. In some aspects, L1 or L5 and L9 or L13 comprise the amino acid sequence of SEQ ID NO:6; L2 or L6 and L10 or L14 comprise the amino acid sequence of SEQ ID NO:27; L3 or L7 and L11 or L15 comprise the amino acid sequence of SEQ ID NO:6; and L4 or L8 and L12 or L16 comprise the amino acid sequence of SEQ ID NO:12. In some aspects, Fc comprises a knob-into-hole modification or Fc effector function knockout mutation. In some aspects, Fc comprises an amino acid sequence having at least 80%, at least 85%, at least 90%, at least 91%, at least 92%, at least 93%, at least 94%, at least 95%, at least 96%, at least 97%, at least 98%, at least 99%, or 100% identity to SEQ ID NO:293 or 294. In some aspects, Fc comprises the amino acid sequence of SEQ ID NO:293 or 294. In some preferred aspects, CDR1, CDR2 and CDR3 of each of VH1, VH2, VH3, VH4, VL1, VL2, VL3 and VL4 have at least 90% identity with the corresponding amino acid sequences specified above, optionally with (i) an Fc having at least 90% identity with the corresponding amino acid sequence recited above; and/or (ii) one or more linker sequence as specified above. In some particularly preferred aspects, CDR1, CDR2 and CDR3 of each of VH1, VH2, VH3, VH4, VL1, VL2, VL3 and VL4 comprise or consist of the corresponding amino acid sequences specified above, optionally with (i) an Fc comprising or consisting of the corresponding amino acid sequence recited above; and/or (ii) one or more linker sequence as specified above.

[0666] In some aspects, (i) VH1 and VH3 comprise a CDR1 comprising an amino acid sequence having at least 80%, at least 85%, at least 90%, at least 91%, at least 92%, at least 93%, at least 94%, at least 95%, at least 96%, at least 97%, at least 98%, at least 99% or 100% identity to SEQ ID NO:272; a CDR2 comprising an amino acid sequence having at least 80%, at least 85%, at least 90%, at least 91%, at least 92%, at least 93%, at least 94%, at least 95%, at least 96%, at least 97%, at least 98%, at least 99% or 100% identity to SEQ ID NO:273; and a CDR3 comprising an amino acid sequence having at least 80%, at least 85%, at least 90%, at least 91%, at least 92%, at least 93%, at least 94%, at least 95%, at least 96%, at least 97%, at least 98%, at least 99% or 100% identity to SEQ ID NO:274; (ii) VH2 comprises a CDR1 comprising an amino acid sequence having at least 80%, at least 85%, at least 90%, at least 91%, at least 92%, at least 93%, at least 94%, at least 95%, at least 96%, at least 97%, at least 98%, at least 99% or 100% identity to SEQ ID NO:59; a CDR2 comprising an amino acid sequence having at least 80%, at least 85%, at least 90%, at least 91%, at least 92%, at least 93%, at least 94%, at least 95%, at least 96%, at least 97%, at least 98%, at least 99% or 100% identity to SEQ ID NO:60; and a CDR3 comprising an amino acid sequence having at least 80%, at least 85%, at least 90%, at least 91%, at least 92%, at least 93%, at least 94%, at least 95%, at least 96%, at least 97%, at least 98%, at least 99% or 100% identity to SEQ ID NO:61; (iii) VH4 comprises a CDR1 comprising an amino acid sequence having at least 80%, at least 85%, at least 90%, at least 91%, at least 92%, at least 93%, at least 94%, at least 95%, at least 96%, at least 97%, at least 98%, at least 99% or 100% identity to SEQ ID NO:280; a CDR2 comprising an amino acid sequence having at least 80%, at least 85%, at least 90%, at least 91%, at least 92%, at least 93%, at least 94%, at least 95%, at least 96%, at least 97%, at least 98%, at least 99% or 100% identity to SEQ ID NO:281; and a CDR3 comprising an amino acid sequence having at least 80%, at least 85%, at least 90%, at least 91%, at least 92%, at least 93%, at least 94%, at least 95%, at least 96%, at least 97%, at least 98%, at least 99% or 100% identity to SEQ ID NO:282; (iv) VL1 and VL3 comprise a CDR1 comprising an amino acid sequence having at least 80%, at least 85%, at least 90%, at least 91%, at least 92%, at least 93%, at least 94%, at least 95%, at least 96%, at least 97%, at least 98%, at least 99% or 100% identity to SEQ ID NO:268; a CDR2 comprising an amino acid sequence having at least 80%, at least 85%, at least 90%, at least 91%, at least 92%, at least 93%, at least 94%, at least 95%, at least 96%, at least 97%, at least 98%, at least 99% or 100% identity to SEQ ID NO:269 (having the sequence of GAS); and a CDR3 comprising an amino acid sequence having at least 80%, at least 85%, at least 90%, at least 91%, at least 92%, at least 93%, at least 94%, at least 95%, at least 96%, at least 97%, at least 98%, at least 99% or 100% identity to SEQ ID NO:270; (v) VL2 comprises a CDR1 comprising an amino acid sequence having at least 80%, at least 85%, at least 90%, at least 91%, at least 92%, at least 93%, at least 94%, at least 95%, at least 96%, at least 97%, at least 98%, at least 99% or 100% identity to SEQ ID NO:55; a CDR2 comprising an amino acid sequence having at least 80%, at least 85%, at least 90%, at least 91%, at least 92%, at least 93%, at least 94%, at least 95%, at least 96%, at least 97%, at least 98%, at least 99% or 100% identity to SEQ ID NO:56 (having the sequence of GTN); and a CDR3 comprising an amino acid sequence having at least 80%, at least 85%, at least 90%, at least 91%, at least 92%, at least 93%, at least 94%, at least 95%, at least 96%, at least 97%, at least 98%, at least 99% or 100% identity to SEQ ID NO:57; and (vi) VL4 comprises a CDR1 comprising an amino acid sequence having at least 80%, at least 85%, at least 90%, at least 91%, at least 92%, at least 93%, at least 94%, at least 95%, at least 96%, at least 97%, at least 98%, at least 99% or 100% identity to SEQ ID NO:276; a CDR2 comprising an amino acid sequence having at least 80%, at least 85%, at least 90%, at least 91%, at least 92%, at least 93%, at least 94%, at least 95%, at least 96%, at least 97%, at least 98%, at least 99% or 100% identity to SEQ ID NO:277 (having the sequence of LGS); and a CDR3 comprising an amino acid sequence having at least 80%, at least 85%, at least 90%, at least 91%, at least 92%, at least 93%, at least 94%, at least 95%, at least 96%, at least 97%, at least 98%, at least 99% or 100% identity to SEQ ID NO:278. In some aspects, (i) VH1 and VH3 comprise a CDR1 comprising the amino acid sequence of SEQ ID NO:272; a CDR2 comprising the amino acid sequence of SEQ ID NO:273; and a CDR3 comprising the amino acid sequence of SEQ ID NO:274; (ii) VH2 comprises a CDR1 comprising the amino acid sequence of SEQ ID NO:59; a CDR2 comprising the amino acid sequence of SEQ ID NO:60; and a CDR3 comprising the amino acid sequence of SEQ ID NO:61; (iii) VH4 comprises a CDR1 comprising the amino acid sequence of SEQ ID NO:280; a CDR2 comprising the amino acid sequence of SEQ ID NO:281; and a CDR3 comprising the amino acid sequence of SEQ ID NO:282; (iv) VL1 and VL3 comprise a CDR1 comprising the amino acid sequence of SEQ ID NO:268; a CDR2 comprising the amino acid sequence of SEQ ID NO:269 (having the sequence of GAS); and a CDR3 comprising the amino acid sequence of SEQ ID NO:270; (v) VL2 comprises a CDR1 comprising the amino acid sequence of SEQ ID NO:55; a CDR2 comprising the amino acid sequence of SEQ ID NO:56 (having the sequence of GTN); and a CDR3 comprising the amino acid sequence of SEQ ID NO:57; and (vi) VL4 comprises a CDR1 comprising the amino acid sequence of SEQ ID NO:276; a CDR2 comprising the amino acid sequence of SEQ ID NO:277 (having the sequence of LGS); and a CDR3 comprising the amino acid sequence of SEQ ID NO:278. In some aspects, L1-L16 comprise the amino acid sequence of any one of SEQ ID NOs:1-34, wherein SEQ ID NO:1 has the amino acid sequence of G, SEQ ID NO:2 has the amino acid sequence of A, SEQ ID NO:3 has the amino acid sequence of GSS and SEQ ID NO:4 has the amino acid sequence of ASG. In some aspects, L1 or L4 and L7 or L10 comprise the amino acid sequence of SEQ ID NO:6; L2 or L5 and L8 or L11 comprise the amino acid sequence of SEQ ID NO:27; and L3 or L6 and L9 or L12 comprise the amino acid sequence of SEQ ID NO:6. In some aspects, L1 or L5 and L9 or L13 comprise the amino acid sequence of SEQ ID NO:6; L2 or L6 and L10 or L14 comprise the amino acid sequence of SEQ ID NO:27; L3 or L7 and L11 or L15 comprise the amino acid sequence of SEQ ID NO:6; and L4 or L8 and L12 or L16 comprise the amino acid sequence of SEQ ID NO:12. In some aspects, Fc comprises a knob-into-hole modification or Fc effector function knockout mutation. In some aspects, Fc comprises an amino acid sequence having at least 80%, at least 85%, at least 90%, at least 91%, at least 92%, at least 93%, at least 94%, at least 95%, at least 96%, at least 97%, at least 98%, at least 99%, or 100% identity to SEQ ID NO:293 or 294. In some aspects, Fc comprises the amino acid sequence of SEQ ID NO:293 or 294. In some preferred aspects, CDR1, CDR2 and CDR3 of each of VH1, VH2, VH3, VH4, VL1, VL2, VL3 and VL4 have at least 90% identity with the corresponding amino acid sequences specified above, optionally with (i) an Fc having at least 90% identity with the corresponding amino acid sequence recited above; and/or (ii) one or more linker sequence as specified above. In some particularly preferred aspects, CDR1, CDR2 and CDR3 of each of VH1, VH2, VH3, VH4, VL1, VL2, VL3 and VL4 comprise or consist of the corresponding amino acid sequences specified above, optionally with (i) an Fc comprising or consisting of the corresponding amino acid sequence recited above; and/or (ii) one or more linker sequence as specified above.

[0667] In some aspects, (i) VH1 and VH4 comprise a CDR1 comprising an amino acid sequence having at least 80%, at least 85%, at least 90%, at least 91%, at least 92%, at least 93%, at least 94%, at least 95%, at least 96%, at least 97%, at least 98%, at least 99% or 100% identity to SEQ ID NO:272; a CDR2 comprising an amino acid sequence having at least 80%, at least 85%, at least 90%, at least 91%, at least 92%, at least 93%, at least 94%, at least 95%, at least 96%, at least 97%, at least 98%, at least 99% or 100% identity to SEQ ID NO:273; and a CDR3 comprising an amino acid sequence having at least 80%, at least 85%, at least 90%, at least 91%, at least 92%, at least 93%, at least 94%, at least 95%, at least 96%, at least 97%, at least 98%, at least 99% or 100% identity to SEQ ID NO:274; (ii) VH2 comprises a CDR1 comprising an amino acid sequence having at least 80%, at least 85%, at least 90%, at least 91%, at least 92%, at least 93%, at least 94%, at least 95%, at least 96%, at least 97%, at least 98%, at least 99% or 100% identity to SEQ ID NO:59; a CDR2 comprising an amino acid sequence having at least 80%, at least 85%, at least 90%, at least 91%, at least 92%, at least 93%, at least 94%, at least 95%, at least 96%, at least 97%, at least 98%, at least 99% or 100% identity to SEQ ID NO:60; and a CDR3 comprising an amino acid sequence having at least 80%, at least 85%, at least 90%, at least 91%, at least 92%, at least 93%, at least 94%, at least 95%, at least 96%, at least 97%, at least 98%, at least 99% or 100% identity to SEQ ID NO:61; (iii) VH3 comprises a CDR1 comprising an amino acid sequence having at least 80%, at least 85%, at least 90%, at least 91%, at least 92%, at least 93%, at least 94%, at least 95%, at least 96%, at least 97%, at least 98%, at least 99% or 100% identity to SEQ ID NO:280; a CDR2 comprising an amino acid sequence having at least 80%, at least 85%, at least 90%, at least 91%, at least 92%, at least 93%, at least 94%, at least 95%, at least 96%, at least 97%, at least 98%, at least 99% or 100% identity to SEQ ID NO:281; and a CDR3 comprising an amino acid sequence having at least 80%, at least 85%, at least 90%, at least 91%, at least 92%, at least 93%, at least 94%, at least 95%, at least 96%, at least 97%, at least 98%, at least 99% or 100% identity to SEQ ID NO:282; (iv) VL1 and VL4 comprise a CDR1 comprising an amino acid sequence having at least 80%, at least 85%, at least 90%, at least 91%, at least 92%, at least 93%, at least 94%, at least 95%, at least 96%, at least 97%, at least 98%, at least 99% or 100% identity to SEQ ID NO:268; a CDR2 comprising an amino acid sequence having at least 80%, at least 85%, at least 90%, at least 91%, at least 92%, at least 93%, at least 94%, at least 95%, at least 96%, at least 97%, at least 98%, at least 99% or 100% identity to SEQ ID NO:269 (having the sequence of GAS); and a CDR3 comprising an amino acid sequence having at least 80%, at least 85%, at least 90%, at least 91%, at least 92%, at least 93%, at least 94%, at least 95%, at least 96%, at least 97%, at least 98%, at least 99% or 100% identity to SEQ ID NO:270; (v) VL2 comprises a CDR1 comprising an amino acid sequence having at least 80%, at least 85%, at least 90%, at least 91%, at least 92%, at least 93%, at least 94%, at least 95%, at least 96%, at least 97%, at least 98%, at least 99% or 100% identity to SEQ ID NO:55; a CDR2 comprising an amino acid sequence having at least 80%, at least 85%, at least 90%, at least 91%, at least 92%, at least 93%, at least 94%, at least 95%, at least 96%, at least 97%, at least 98%, at least 99% or 100% identity to SEQ ID NO:56 (having the sequence of GTN); and a CDR3 comprising an amino acid sequence having at least 80%, at least 85%, at least 90%, at least 91%, at least 92%, at least 93%, at least 94%, at least 95%, at least 96%, at least 97%, at least 98%, at least 99% or 100% identity to SEQ ID NO:57; and (vi) VL3 comprises a CDR1 comprising an amino acid sequence having at least 80%, at least 85%, at least 90%, at least 91%, at least 92%, at least 93%, at least 94%, at least 95%, at least 96%, at least 97%, at least 98%, at least 99% or 100% identity to SEQ ID NO:276; a CDR2 comprising an amino acid sequence having at least 80%, at least 85%, at least 90%, at least 91%, at least 92%, at least 93%, at least 94%, at least 95%, at least 96%, at least 97%, at least 98%, at least 99% or 100% identity to SEQ ID NO:277 (having the sequence of LGS); and a CDR3 comprising an amino acid sequence having at least 80%, at least 85%, at least 90%, at least 91%, at least 92%, at least 93%, at least 94%, at least 95%, at least 96%, at least 97%, at least 98%, at least 99% or 100% identity to SEQ ID NO:278. In some aspects, (i) VH1 and VH4 comprise a CDR1 comprising the amino acid sequence of SEQ ID NO:272; a CDR2 comprising the amino acid sequence of SEQ ID NO:273; and a CDR3 comprising the amino acid sequence of SEQ ID NO:274; (ii) VH2 comprises a CDR1 comprising the amino acid sequence of SEQ ID NO:59; a CDR2 comprising the amino acid sequence of SEQ ID NO:60; and a CDR3 comprising the amino acid sequence of SEQ ID NO:61; (iii) VH3 comprises a CDR1 comprising the amino acid sequence of SEQ ID NO:280; a CDR2 comprising the amino acid sequence of SEQ ID NO:281; and a CDR3 comprising the amino acid sequence of SEQ ID NO:282; (iv) VL1 and VL4 comprise a CDR1 comprising the amino acid sequence of SEQ ID NO:268; a CDR2 comprising the amino acid sequence of SEQ ID NO:269 (having the sequence of GAS); and a CDR3 comprising the amino acid sequence of SEQ ID NO:270; (v) VL2 comprises a CDR1 comprising the amino acid sequence of SEQ ID NO:55; a CDR2 comprising the amino acid sequence of SEQ ID NO:56 (having the sequence of GTN); and a CDR3 comprising the amino acid sequence of SEQ ID NO:57; and (vi) VL3 comprises a CDR1 comprising the amino acid sequence of SEQ ID NO:276; a CDR2 comprising the amino acid sequence of SEQ ID NO:277 (having the sequence of LGS); and a CDR3 comprising the amino acid sequence of SEQ ID NO:278. In some aspects, L1-L16 comprise the amino acid sequence of any one of SEQ ID NOs:1-34, wherein SEQ ID NO:1 has the amino acid sequence of G, SEQ ID NO:2 has the amino acid sequence of A, SEQ ID NO:3 has the amino acid sequence of GSS and SEQ ID NO:4 has the amino acid sequence of ASG. In some aspects, L1 or L4 and L7 or L10 comprise the amino acid sequence of SEQ ID NO:6; L2 or L5 and L8 or L11 comprise the amino acid sequence of SEQ ID NO:27; and L3 or L6 and L9 or L12 comprise the amino acid sequence of SEQ ID NO:6. In some aspects, L1 or L5 and L9 or L13 comprise the amino acid sequence of SEQ ID NO:6; L2 or L6 and L10 or L14 comprise the amino acid sequence of SEQ ID NO:27; L3 or L7 and L11 or L15 comprise the amino acid sequence of SEQ ID NO:6; and L4 or L8 and L12 or L16 comprise the amino acid sequence of SEQ ID NO:12. In some aspects, Fc comprises a knob-into-hole modification or Fc effector function knockout mutation. In some aspects, Fc comprises an amino acid sequence having at least 80%, at least 85%, at least 90%, at least 91%, at least 92%, at least 93%, at least 94%, at least 95%, at least 96%, at least 97%, at least 98%, at least 99%, or 100% identity to SEQ ID NO:293 or 294. In some aspects, Fc comprises the amino acid sequence of SEQ ID NO:293 or 294. In some preferred aspects, CDR1, CDR2 and CDR3 of each of VH1, VH2, VH3, VH4, VL1, VL2, VL3 and VL4 have at least 90% identity with the corresponding amino acid sequences specified above, optionally with (i) an Fc having at least 90% identity with the corresponding amino acid sequence recited above; and/or (ii) one or more linker sequence as specified above. In some particularly preferred aspects, CDR1, CDR2 and CDR3 of each of VH1, VH2, VH3, VH4, VL1, VL2, VL3 and VL4 comprise or consist of the corresponding amino acid sequences specified above, optionally with (i) an Fc comprising or consisting of the corresponding amino acid sequence recited above; and/or (ii) one or more linker sequence as specified above.

[0668] In some aspects, (i) VH1 and VH3 comprise a CDR1 comprising an amino acid sequence having at least 80%, at least 85%, at least 90%, at least 91%, at least 92%, at least 93%, at least 94%, at least 95%, at least 96%, at least 97%, at least 98%, at least 99% or 100% identity to SEQ ID NO:59; a CDR2 comprising an amino acid sequence having at least 80%, at least 85%, at least 90%, at least 91%, at least 92%, at least 93%, at least 94%, at least 95%, at least 96%, at least 97%, at least 98%, at least 99% or 100% identity to SEQ ID NO:60; and a CDR3 comprising an amino acid sequence having at least 80%, at least 85%, at least 90%, at least 91%, at least 92%, at least 93%, at least 94%, at least 95%, at least 96%, at least 97%, at least 98%, at least 99% or 100% identity to SEQ ID NO:61; (ii) VH2 comprises a CDR1 comprising an amino acid sequence having at least 80%, at least 85%, at least 90%, at least 91%, at least 92%, at least 93%, at least 94%, at least 95%, at least 96%, at least 97%, at least 98%, at least 99% or 100% identity to SEQ ID NO:272; a CDR2 comprising an amino acid sequence having at least 80%, at least 85%, at least 90%, at least 91%, at least 92%, at least 93%, at least 94%, at least 95%, at least 96%, at least 97%, at least 98%, at least 99% or 100% identity to SEQ ID NO:273; and a CDR3 comprising an amino acid sequence having at least 80%, at least 85%, at least 90%, at least 91%, at least 92%, at least 93%, at least 94%, at least 95%, at least 96%, at least 97%, at least 98%, at least 99% or 100% identity to SEQ ID NO:274; (iii) VH4 comprises a CDR1 comprising an amino acid sequence having at least 80%, at least 85%, at least 90%, at least 91%, at least 92%, at least 93%, at least 94%, at least 95%, at least 96%, at least 97%, at least 98%, at least 99% or 100% identity to SEQ ID NO:280; a CDR2 comprising an amino acid sequence having at least 80%, at least 85%, at least 90%, at least 91%, at least 92%, at least 93%, at least 94%, at least 95%, at least 96%, at least 97%, at least 98%, at least 99% or 100% identity to SEQ ID NO:281; and a CDR3 comprising an amino acid sequence having at least 80%, at least 85%, at least 90%, at least 91%, at least 92%, at least 93%, at least 94%, at least 95%, at least 96%, at least 97%, at least 98%, at least 99% or 100% identity to SEQ ID NO:282; (iv) VL1 and VL3 comprise a CDR1 comprising an amino acid sequence having at least 80%, at least 85%, at least 90%, at least 91%, at least 92%, at least 93%, at least 94%, at least 95%, at least 96%, at least 97%, at least 98%, at least 99% or 100% identity to SEQ ID NO:55; a CDR2 comprising an amino acid sequence having at least 80%, at least 85%, at least 90%, at least 91%, at least 92%, at least 93%, at least 94%, at least 95%, at least 96%, at least 97%, at least 98%, at least 99% or 100% identity to SEQ ID NO:56 (having the sequence of GTN); and a CDR3 comprising an amino acid sequence having at least 80%, at least 85%, at least 90%, at least 91%, at least 92%, at least 93%, at least 94%, at least 95%, at least 96%, at least 97%, at least 98%, at least 99% or 100% identity to SEQ ID NO:57; (v) VL2 comprises a CDR1 comprising an amino acid sequence having at least 80%, at least 85%, at least 90%, at least 91%, at least 92%, at least 93%, at least 94%, at least 95%, at least 96%, at least 97%, at least 98%, at least 99% or 100% identity to SEQ ID NO:268; a CDR2 comprising an amino acid sequence having at least 80%, at least 85%, at least 90%, at least 91%, at least 92%, at least 93%, at least 94%, at least 95%, at least 96%, at least 97%, at least 98%, at least 99% or 100% identity to SEQ ID NO:269 (having the sequence of GAS); and a CDR3 comprising an amino acid sequence having at least 80%, at least 85%, at least 90%, at least 91%, at least 92%, at least 93%, at least 94%, at least 95%, at least 96%, at least 97%, at least 98%, at least 99% or 100% identity to SEQ ID NO:270; and (vi) VL4 comprises a CDR1 comprising an amino acid sequence having at least 80%, at least 85%, at least 90%, at least 91%, at least 92%, at least 93%, at least 94%, at least 95%, at least 96%, at least 97%, at least 98%, at least 99% or 100% identity to SEQ ID NO:276; a CDR2 comprising an amino acid sequence having at least 80%, at least 85%, at least 90%, at least 91%, at least 92%, at least 93%, at least 94%, at least 95%, at least 96%, at least 97%, at least 98%, at least 99% or 100% identity to SEQ ID NO:277 (having the sequence of LGS); and a CDR3 comprising an amino acid sequence having at least 80%, at least 85%, at least 90%, at least 91%, at least 92%, at least 93%, at least 94%, at least 95%, at least 96%, at least 97%, at least 98%, at least 99% or 100% identity to SEQ ID NO:278. In some aspects, (i) VH1 and VH3 comprise a CDR1 comprising the amino acid sequence of SEQ ID NO:59; a CDR2 comprising the amino acid sequence of SEQ ID NO:60; and a CDR3 comprising the amino acid sequence of SEQ ID NO:61; (ii) VH2 comprises a CDR1 comprising the amino acid sequence of SEQ ID NO:272; a CDR2 comprising the amino acid sequence of SEQ ID NO:273 and a CDR3 comprising the amino acid sequence of SEQ ID NO:274; (iii) VH4 comprises a CDR1 comprising the amino acid sequence of SEQ ID NO:280; a CDR2 comprising the amino acid sequence of SEQ ID NO:281; and a CDR3 comprising the amino acid sequence of SEQ ID NO:282; (iv) VL1 and VL3 comprise a CDR1 comprising the amino acid sequence of SEQ ID NO:55; a CDR2 comprising the amino acid sequence of SEQ ID NO:56 (having the sequence of GTN); and a CDR3 comprising the amino acid sequence of SEQ ID NO:57; (v) VL2 comprises a CDR1 comprising the amino acid sequence of SEQ ID NO:268; a CDR2 comprising the amino acid sequence of SEQ ID NO:269 (having the sequence of GAS); and a CDR3 comprising the amino acid sequence of SEQ ID NO:270; and (vi) VL4 comprises a CDR1 comprising the amino acid sequence of SEQ ID NO:276; a CDR2 comprising the amino acid sequence of SEQ ID NO:277 (having the sequence of LGS); and a CDR3 comprising the amino acid sequence of SEQ ID NO:278. In some aspects, L1-L16 comprise the amino acid sequence of any one of SEQ ID NOs:1-34, wherein SEQ ID NO:1 has the amino acid sequence of G, SEQ ID NO:2 has the amino acid sequence of A, SEQ ID NO:3 has the amino acid sequence of GSS and SEQ ID NO:4 has the amino acid sequence of ASG. In some aspects, L1 or L4 and L7 or L10 comprise the amino acid sequence of SEQ ID NO:6; L2 or L5 and L8 or L11 comprise the amino acid sequence of SEQ ID NO: 27; and L3 or L6 and L9 or L12 comprise the amino acid sequence of SEQ ID NO:6. In some aspects, L1 or L5 and L9 or L13 comprise the amino acid sequence of SEQ ID NO:6; L2 or L6 and L10 or L14 comprise the amino acid sequence of SEQ ID NO:27; L3 or L7 and L11 or L15 comprise the amino acid sequence of SEQ ID NO:6; and L4 or L8 and L12 or L16 comprise the amino acid sequence of SEQ ID NO:12. In some aspects, Fc comprises a knob-into-hole modification or Fc effector function knockout mutation. In some aspects, Fc comprises an amino acid sequence having at least 80%, at least 85%, at least 90%, at least 91%, at least 92%, at least 93%, at least 94%, at least 95%, at least 96%, at least 97%, at least 98%, at least 99%, or 100% identity to SEQ ID NO:293 or 294. In some aspects, Fc comprises the amino acid sequence of SEQ ID NO:293 or 294. In some preferred aspects, CDR1, CDR2 and CDR3 of each of VH1, VH2, VH3, VH4, VL1, VL2, VL3 and VL4 have at least 90% identity with the corresponding amino acid sequences specified above, optionally with (i) an Fc having at least 90% identity with the corresponding amino acid sequence recited above; and/or (ii) one or more linker sequence as specified above. In some particularly preferred aspects, CDR1, CDR2 and CDR3 of each of VH1, VH2, VH3, VH4, VL1, VL2, VL3 and VL4 comprise or consist of the corresponding amino acid sequences specified above, optionally with (i) an Fc comprising or consisting of the corresponding amino acid sequence recited above; and/or (ii) one or more linker sequence as specified above.

[0669] In some aspects, (i) VH1 and VH4 comprise a CDR1 comprising an amino acid sequence having at least 80%, at least 85%, at least 90%, at least 91%, at least 92%, at least 93%, at least 94%, at least 95%, at least 96%, at least 97%, at least 98%, at least 99% or 100% identity to SEQ ID NO:59; a CDR2 comprising an amino acid sequence having at least 80%, at least 85%, at least 90%, at least 91%, at least 92%, at least 93%, at least 94%, at least 95%, at least 96%, at least 97%, at least 98%, at least 99% or 100% identity to SEQ ID NO:60; and a CDR3 comprising an amino acid sequence having at least 80%, at least 85%, at least 90%, at least 91%, at least 92%, at least 93%, at least 94%, at least 95%, at least 96%, at least 97%, at least 98%, at least 99% or 100% identity to SEQ ID NO:61; (ii) VH2 comprises a CDR1 comprising an amino acid sequence having at least 80%, at least 85%, at least 90%, at least 91%, at least 92%, at least 93%, at least 94%, at least 95%, at least 96%, at least 97%, at least 98%, at least 99% or 100% identity to SEQ ID NO:272; a CDR2 comprising an amino acid sequence having at least 80%, at least 85%, at least 90%, at least 91%, at least 92%, at least 93%, at least 94%, at least 95%, at least 96%, at least 97%, at least 98%, at least 99% or 100% identity to SEQ ID NO:273; and a CDR3 comprising an amino acid sequence having at least 80%, at least 85%, at least 90%, at least 91%, at least 92%, at least 93%, at least 94%, at least 95%, at least 96%, at least 97%, at least 98%, at least 99% or 100% identity to SEQ ID NO:274; (iii) VH3 comprises a CDR1 comprising an amino acid sequence having at least 80%, at least 85%, at least 90%, at least 91%, at least 92%, at least 93%, at least 94%, at least 95%, at least 96%, at least 97%, at least 98%, at least 99% or 100% identity to SEQ ID NO:280; a CDR2 comprising an amino acid sequence having at least 80%, at least 85%, at least 90%, at least 91%, at least 92%, at least 93%, at least 94%, at least 95%, at least 96%, at least 97%, at least 98%, at least 99% or 100% identity to SEQ ID NO:281; and a CDR3 comprising an amino acid sequence having at least 80%, at least 85%, at least 90%, at least 91%, at least 92%, at least 93%, at least 94%, at least 95%, at least 96%, at least 97%, at least 98%, at least 99% or 100% identity to SEQ ID NO:282; (iv) VL1 and VL4 comprise a CDR1 comprising an amino acid sequence having at least 80%, at least 85%, at least 90%, at least 91%, at least 92%, at least 93%, at least 94%, at least 95%, at least 96%, at least 97%, at least 98%, at least 99% or 100% identity to SEQ ID NO:55; a CDR2 comprising an amino acid sequence having at least 80%, at least 85%, at least 90%, at least 91%, at least 92%, at least 93%, at least 94%, at least 95%, at least 96%, at least 97%, at least 98%, at least 99% or 100% identity to SEQ ID NO:56 (having the sequence of GTN); and a CDR3 comprising an amino acid sequence having at least 80%, at least 85%, at least 90%, at least 91%, at least 92%, at least 93%, at least 94%, at least 95%, at least 96%, at least 97%, at least 98%, at least 99% or 100% identity to SEQ ID NO:57; (v) VL2 comprises a CDR1 comprising an amino acid sequence having at least 80%, at least 85%, at least 90%, at least 91%, at least 92%, at least 93%, at least 94%, at least 95%, at least 96%, at least 97%, at least 98%, at least 99% or 100% identity to SEQ ID NO:268; a CDR2 comprising an amino acid sequence having at least 80%, at least 85%, at least 90%, at least 91%, at least 92%, at least 93%, at least 94%, at least 95%, at least 96%, at least 97%, at least 98%, at least 99% or 100% identity to SEQ ID NO:269 (having the sequence of GAS); and a CDR3 comprising an amino acid sequence having at least 80%, at least 85%, at least 90%, at least 91%, at least 92%, at least 93%, at least 94%, at least 95%, at least 96%, at least 97%, at least 98%, at least 99% or 100% identity to SEQ ID NO:270; and (vi) VL3 comprises a CDR1 comprising an amino acid sequence having at least 80%, at least 85%, at least 90%, at least 91%, at least 92%, at least 93%, at least 94%, at least 95%, at least 96%, at least 97%, at least 98%, at least 99% or 100% identity to SEQ ID NO:276; a CDR2 comprising an amino acid sequence having at least 80%, at least 85%, at least 90%, at least 91%, at least 92%, at least 93%, at least 94%, at least 95%, at least 96%, at least 97%, at least 98%, at least 99% or 100% identity to SEQ ID NO:277 (having the sequence of LGS); and a CDR3 comprising an amino acid sequence having at least 80%, at least 85%, at least 90%, at least 91%, at least 92%, at least 93%, at least 94%, at least 95%, at least 96%, at least 97%, at least 98%, at least 99% or 100% identity to SEQ ID NO:278. In some aspects, (i) VH1 and VH4 comprise a CDR1 comprising the amino acid sequence of SEQ ID NO:59; a CDR2 comprising the amino acid sequence of SEQ ID NO:60; and a CDR3 comprising the amino acid sequence of SEQ ID NO:61; (ii) VH2 comprises a CDR1 comprising the amino acid sequence of SEQ ID NO:272; a CDR2 comprising the amino acid sequence of SEQ ID NO:273 and a CDR3 comprising the amino acid sequence of SEQ ID NO:274; (iii) VH3 comprises a CDR1 comprising the amino acid sequence of SEQ ID NO:280; a CDR2 comprising the amino acid sequence of SEQ ID NO:281; and a CDR3 comprising the amino acid sequence of SEQ ID NO:282; (iv) VL1 and VL4 comprise a CDR1 comprising the amino acid sequence of SEQ ID NO:55; a CDR2 comprising the amino acid sequence of SEQ ID NO:56 (having the sequence of GTN); and a CDR3 comprising the amino acid sequence of SEQ ID NO:57; (v) VL2 comprises a CDR1 comprising the amino acid sequence of SEQ ID NO:268; a CDR2 comprising the amino acid sequence of SEQ ID NO:269 (having the sequence of GAS); and a CDR3 comprising the amino acid sequence of SEQ ID NO:270; and (vi) VL3 comprises a CDR1 comprising the amino acid sequence of SEQ ID NO:276; a CDR2 comprising the amino acid sequence of SEQ ID NO:277 (having the sequence of LGS); and a CDR3 comprising the amino acid sequence of SEQ ID NO:278. In some aspects, L1-L16 comprise the amino acid sequence of any one of SEQ ID NOs:1-34, wherein SEQ ID NO:1 has the amino acid sequence of G, SEQ ID NO:2 has the amino acid sequence of A, SEQ ID NO:3 has the amino acid sequence of GSS and SEQ ID NO:4 has the amino acid sequence of ASG. In some aspects, L1 or L4 and L7 or L10 comprise the amino acid sequence of SEQ ID NO:6; L2 or L5 and L8 or L11 comprise the amino acid sequence of SEQ ID NO:27; and L3 or L6 and L9 or L12 comprise the amino acid sequence of SEQ ID NO:6. In some aspects, L1 or L5 and L9 or L13 comprise the amino acid sequence of SEQ ID NO:6; L2 or L6 and L10 or L14 comprise the amino acid sequence of SEQ ID NO:27; L3 or L7 and L11 or L15 comprise the amino acid sequence of SEQ ID NO:6; and L4 or L8 and L12 or L16 comprise the amino acid sequence of SEQ ID NO:12. In some aspects, Fc comprises a knob-into-hole modification or Fc effector function knockout mutation. In some aspects, Fc comprises an amino acid sequence having at least 80%, at least 85%, at least 90%, at least 91%, at least 92%, at least 93%, at least 94%, at least 95%, at least 96%, at least 97%, at least 98%, at least 99%, or 100% identity to SEQ ID NO:293 or 294. In some aspects, Fc comprises the amino acid sequence of SEQ ID NO:293 or 294. In some preferred aspects, CDR1, CDR2 and CDR3 of each of VH1, VH2, VH3, VH4, VL1, VL2, VL3 and VL4 have at least 90% identity with the corresponding amino acid sequences specified above, optionally with (i) an Fc having at least 90% identity with the corresponding amino acid sequence recited above; and/or (ii) one or more linker sequence as specified above. In some particularly preferred aspects, CDR1, CDR2 and CDR3 of each of VH1, VH2, VH3, VH4, VL1, VL2, VL3 and VL4 comprise or consist of the corresponding amino acid sequences specified above, optionally with (i) an Fc comprising or consisting of the corresponding amino acid sequence recited above; and/or (ii) one or more linker sequence as specified above.

[0670] In some aspects, (i) VH1 comprises a CDR1 comprising an amino acid sequence having at least 80%, at least 85%, at least 90%, at least 91%, at least 92%, at least 93%, at least 94%, at least 95%, at least 96%, at least 97%, at least 98%, at least 99% or 100% identity to SEQ ID NO:272; a CDR2 comprising an amino acid sequence having at least 80%, at least 85%, at least 90%, at least 91%, at least 92%, at least 93%, at least 94%, at least 95%, at least 96%, at least 97%, at least 98%, at least 99% or 100% identity to SEQ ID NO:273; and a CDR3 comprising an amino acid sequence having at least 80%, at least 85%, at least 90%, at least 91%, at least 92%, at least 93%, at least 94%, at least 95%, at least 96%, at least 97%, at least 98%, at least 99% or 100% identity to SEQ ID NO:274; (ii) VH2 and VH3 comprise a CDR1 comprising an amino acid sequence having at least 80%, at least 85%, at least 90%, at least 91%, at least 92%, at least 93%, at least 94%, at least 95%, at least 96%, at least 97%, at least 98%, at least 99% or 100% identity to SEQ ID NO:59; a CDR2 comprising an amino acid sequence having at least 80%, at least 85%, at least 90%, at least 91%, at least 92%, at least 93%, at least 94%, at least 95%, at least 96%, at least 97%, at least 98%, at least 99% or 100% identity to SEQ ID NO:60; and a CDR3 comprising an amino acid sequence having at least 80%, at least 85%, at least 90%, at least 91%, at least 92%, at least 93%, at least 94%, at least 95%, at least 96%, at least 97%, at least 98%, at least 99% or 100% identity to SEQ ID NO:61; (iii) VH4 comprises a CDR1 comprising an amino acid sequence having at least 80%, at least 85%, at least 90%, at least 91%, at least 92%, at least 93%, at least 94%, at least 95%, at least 96%, at least 97%, at least 98%, at least 99% or 100% identity to SEQ ID NO:280; a CDR2 comprising an amino acid sequence having at least 80%, at least 85%, at least 90%, at least 91%, at least 92%, at least 93%, at least 94%, at least 95%, at least 96%, at least 97%, at least 98%, at least 99% or 100% identity to SEQ ID NO:281; and a CDR3 comprising an amino acid sequence having at least 80%, at least 85%, at least 90%, at least 91%, at least 92%, at least 93%, at least 94%, at least 95%, at least 96%, at least 97%, at least 98%, at least 99% or 100% identity to SEQ ID NO:282; (iv) VL1 comprises a CDR1 comprising an amino acid sequence having at least 80%, at least 85%, at least 90%, at least 91%, at least 92%, at least 93%, at least 94%, at least 95%, at least 96%, at least 97%, at least 98%, at least 99% or 100% identity to SEQ ID NO:268; a CDR2 comprising an amino acid sequence having at least 80%, at least 85%, at least 90%, at least 91%, at least 92%, at least 93%, at least 94%, at least 95%, at least 96%, at least 97%, at least 98%, at least 99% or 100% identity to SEQ ID NO:269 (having the sequence of GAS); and a CDR3 comprising an amino acid sequence having at least 80%, at least 85%, at least 90%, at least 91%, at least 92%, at least 93%, at least 94%, at least 95%, at least 96%, at least 97%, at least 98%, at least 99% or 100% identity to SEQ ID NO:270; (v) VL2 and VL3 comprise a CDR1 comprising an amino acid sequence having at least 80%, at least 85%, at least 90%, at least 91%, at least 92%, at least 93%, at least 94%, at least 95%, at least 96%, at least 97%, at least 98%, at least 99% or 100% identity to SEQ ID NO:55; a CDR2 comprising an amino acid sequence having at least 80%, at least 85%, at least 90%, at least 91%, at least 92%, at least 93%, at least 94%, at least 95%, at least 96%, at least 97%, at least 98%, at least 99% or 100% identity to SEQ ID NO:56 (having the sequence of GTN); and a CDR3 comprising an amino acid sequence having at least 80%, at least 85%, at least 90%, at least 91%, at least 92%, at least 93%, at least 94%, at least 95%, at least 96%, at least 97%, at least 98%, at least 99% or 100% identity to SEQ ID NO:57; and (vi) VL4 comprises a CDR1 comprising an amino acid sequence having at least 80%, at least 85%, at least 90%, at least 91%, at least 92%, at least 93%, at least 94%, at least 95%, at least 96%, at least 97%, at least 98%, at least 99% or 100% identity to SEQ ID NO:276; a CDR2 comprising an amino acid sequence having at least 80%, at least 85%, at least 90%, at least 91%, at least 92%, at least 93%, at least 94%, at least 95%, at least 96%, at least 97%, at least 98%, at least 99% or 100% identity to SEQ ID NO:277 (having the sequence of LGS); and a CDR3 comprising an amino acid sequence having at least 80%, at least 85%, at least 90%, at least 91%, at least 92%, at least 93%, at least 94%, at least 95%, at least 96%, at least 97%, at least 98%, at least 99% or 100% identity to SEQ ID NO:278. In some aspects, (i) VH1 comprises a CDR1 comprising the amino acid sequence of SEQ ID NO:272; a CDR2 comprising the amino acid sequence of SEQ ID NO:273; and a CDR3 comprising the amino acid sequence of SEQ ID NO:274; (ii) VH2 and VH3 comprise a CDR1 comprising the amino acid sequence of SEQ ID NO:59; a CDR2 comprising the amino acid sequence of SEQ ID NO:60; and a CDR3 comprising the amino acid sequence of SEQ ID NO:61; (iii) VH4 comprises a CDR1 comprising the amino acid sequence of SEQ ID NO:280; a CDR2 comprising the amino acid sequence of SEQ ID NO:281; and a CDR3 comprising the amino acid sequence of SEQ ID NO:282; (iv) VL1 comprises a CDR1 comprising the amino acid sequence of SEQ ID NO:268; a CDR2 comprising the amino acid sequence of SEQ ID NO:269 (having the sequence of GAS); and a CDR3 comprising the amino acid sequence of SEQ ID NO:270; (v) VL2 and VL3 comprise a CDR1 comprising the amino acid sequence of SEQ ID NO:55; a CDR2 comprising the amino acid sequence of SEQ ID NO:56 (having the sequence of GTN); and a CDR3 comprising the amino acid sequence of SEQ ID NO:57; and (vi) VL4 comprises a CDR1 comprising the amino acid sequence of SEQ ID NO:276; a CDR2 comprising the amino acid sequence of SEQ ID NO:277 (having the sequence of LGS); and a CDR3 comprising the amino acid sequence of SEQ ID NO:278. In some aspects, L1-L16 comprise the amino acid sequence of any one of SEQ ID NOs:1-34, wherein SEQ ID NO:1 has the amino acid sequence of G, SEQ ID NO:2 has the amino acid sequence of A, SEQ ID NO:3 has the amino acid sequence of GSS and SEQ ID NO:4 has the amino acid sequence of ASG. In some aspects, L1 or L4 and L7 or L10 comprise the amino acid sequence of SEQ ID NO:6; L2 or L5 and L8 or L11 comprise the amino acid sequence of SEQ ID NO: 27; and L3 or L6 and L9 or L12 comprise the amino acid sequence of SEQ ID NO:6. In some aspects, L1 or L5 and L9 or L13 comprise the amino acid sequence of SEQ ID NO:6; L2 or L6 and L10 or L14 comprise the amino acid sequence of SEQ ID NO:27; L3 or L7 and L11 or L15 comprise the amino acid sequence of SEQ ID NO:6; and L4 or L8 and L12 or L16 comprise the amino acid sequence of SEQ ID NO:12. In some aspects, Fc comprises a knob-into-hole modification or Fc effector function knockout mutation. In some aspects, Fc comprises an amino acid sequence having at least 80%, at least 85%, at least 90%, at least 91%, at least 92%, at least 93%, at least 94%, at least 95%, at least 96%, at least 97%, at least 98%, at least 99%, or 100% identity to SEQ ID NO:293 or 294. In some aspects, Fc comprises the amino acid sequence of SEQ ID NO:293 or 294. In some preferred aspects, CDR1, CDR2 and CDR3 of each of VH1, VH2, VH3, VH4, VL1, VL2, VL3 and VL4 have at least 90% identity with the corresponding amino acid sequences specified above, optionally with (i) an Fc having at least 90% identity with the corresponding amino acid sequence recited above; and/or (ii) one or more linker sequence as specified above. In some particularly preferred aspects, CDR1, CDR2 and CDR3 of each of VH1, VH2, VH3, VH4, VL1, VL2, VL3 and VL4 comprise or consist of the corresponding amino acid sequences specified above, optionally with (i) an Fc comprising or consisting of the corresponding amino acid sequence recited above; and/or (ii) one or more linker sequence as specified above.

[0671] In some aspects, (i) VH1 comprises a CDR1 comprising an amino acid sequence having at least 80%, at least 85%, at least 90%, at least 91%, at least 92%, at least 93%, at least 94%, at least 95%, at least 96%, at least 97%, at least 98%, at least 99% or 100% identity to SEQ ID NO:272; a CDR2 comprising an amino acid sequence having at least 80%, at least 85%, at least 90%, at least 91%, at least 92%, at least 93%, at least 94%, at least 95%, at least 96%, at least 97%, at least 98%, at least 99% or 100% identity to SEQ ID NO:273; and a CDR3 comprising an amino acid sequence having at least 80%, at least 85%, at least 90%, at least 91%, at least 92%, at least 93%, at least 94%, at least 95%, at least 96%, at least 97%, at least 98%, at least 99% or 100% identity to SEQ ID NO:274; (ii) VH2 and VH4 comprise a CDR1 comprising an amino acid sequence having at least 80%, at least 85%, at least 90%, at least 91%, at least 92%, at least 93%, at least 94%, at least 95%, at least 96%, at least 97%, at least 98%, at least 99% or 100% identity to SEQ ID NO:59; a CDR2 comprising an amino acid sequence having at least 80%, at least 85%, at least 90%, at least 91%, at least 92%, at least 93%, at least 94%, at least 95%, at least 96%, at least 97%, at least 98%, at least 99% or 100% identity to SEQ ID NO:60; and a CDR3 comprising an amino acid sequence having at least 80%, at least 85%, at least 90%, at least 91%, at least 92%, at least 93%, at least 94%, at least 95%, at least 96%, at least 97%, at least 98%, at least 99% or 100% identity to SEQ ID NO:61; (iii) VH3 comprises a CDR1 comprising an amino acid sequence having at least 80%, at least 85%, at least 90%, at least 91%, at least 92%, at least 93%, at least 94%, at least 95%, at least 96%, at least 97%, at least 98%, at least 99% or 100% identity to SEQ ID NO:280; a CDR2 comprising an amino acid sequence having at least 80%, at least 85%, at least 90%, at least 91%, at least 92%, at least 93%, at least 94%, at least 95%, at least 96%, at least 97%, at least 98%, at least 99% or 100% identity to SEQ ID NO:281; and a CDR3 comprising an amino acid sequence having at least 80%, at least 85%, at least 90%, at least 91%, at least 92%, at least 93%, at least 94%, at least 95%, at least 96%, at least 97%, at least 98%, at least 99% or 100% identity to SEQ ID NO:282; (iv) VL1 comprises a CDR1 comprising an amino acid sequence having at least 80%, at least 85%, at least 90%, at least 91%, at least 92%, at least 93%, at least 94%, at least 95%, at least 96%, at least 97%, at least 98%, at least 99% or 100% identity to SEQ ID NO:268; a CDR2 comprising an amino acid sequence having at least 80%, at least 85%, at least 90%, at least 91%, at least 92%, at least 93%, at least 94%, at least 95%, at least 96%, at least 97%, at least 98%, at least 99% or 100% identity to SEQ ID NO:269 (having the sequence of GAS); and a CDR3 comprising an amino acid sequence having at least 80%, at least 85%, at least 90%, at least 91%, at least 92%, at least 93%, at least 94%, at least 95%, at least 96%, at least 97%, at least 98%, at least 99% or 100% identity to SEQ ID NO:270; (v) VL2 and VL4 comprise a CDR1 comprising an amino acid sequence having at least 80%, at least 85%, at least 90%, at least 91%, at least 92%, at least 93%, at least 94%, at least 95%, at least 96%, at least 97%, at least 98%, at least 99% or 100% identity to SEQ ID NO:55; a CDR2 comprising an amino acid sequence having at least 80%, at least 85%, at least 90%, at least 91%, at least 92%, at least 93%, at least 94%, at least 95%, at least 96%, at least 97%, at least 98%, at least 99% or 100% identity to SEQ ID NO:56 (having the sequence of GTN); and a CDR3 comprising an amino acid sequence having at least 80%, at least 85%, at least 90%, at least 91%, at least 92%, at least 93%, at least 94%, at least 95%, at least 96%, at least 97%, at least 98%, at least 99% or 100% identity to SEQ ID NO:57; and (vi) VL3 comprises a CDR1 comprising an amino acid sequence having at least 80%, at least 85%, at least 90%, at least 91%, at least 92%, at least 93%, at least 94%, at least 95%, at least 96%, at least 97%, at least 98%, at least 99% or 100% identity to SEQ ID NO:276; a CDR2 comprising an amino acid sequence having at least 80%, at least 85%, at least 90%, at least 91%, at least 92%, at least 93%, at least 94%, at least 95%, at least 96%, at least 97%, at least 98%, at least 99% or 100% identity to SEQ ID NO:277 (having the sequence of LGS); and a CDR3 comprising an amino acid sequence having at least 80%, at least 85%, at least 90%, at least 91%, at least 92%, at least 93%, at least 94%, at least 95%, at least 96%, at least 97%, at least 98%, at least 99% or 100% identity to SEQ ID NO:278. In some aspects, (i) VH1 comprises a CDR1 comprising the amino acid sequence of SEQ ID NO:272; a CDR2 comprising the amino acid sequence of SEQ ID NO:273; and a CDR3 comprising the amino acid sequence of SEQ ID NO:274; (ii) VH2 and VH4 comprise a CDR1 comprising the amino acid sequence of SEQ ID NO:59; a CDR2 comprising the amino acid sequence of SEQ ID NO:60; and a CDR3 comprising the amino acid sequence of SEQ ID NO:61; (iii) VH3 comprises a CDR1 comprising the amino acid sequence of SEQ ID NO:280; a CDR2 comprising the amino acid sequence of SEQ ID NO:281; and a CDR3 comprising the amino acid sequence of SEQ ID NO:282; (iv) VL1 comprises a CDR1 comprising the amino acid sequence of SEQ ID NO:268; a CDR2 comprising the amino acid sequence of SEQ ID NO:269 (having the sequence of GAS); and a CDR3 comprising the amino acid sequence of SEQ ID NO:270; (v) VL2 and VL4 comprise a CDR1 comprising the amino acid sequence of SEQ ID NO:55; a CDR2 comprising the amino acid sequence of SEQ ID NO:56 (having the sequence of GTN); and a CDR3 comprising the amino acid sequence of SEQ ID NO:57; and (vi) VL3 comprises a CDR1 comprising the amino acid sequence of SEQ ID NO:276; a CDR2 comprising the amino acid sequence of SEQ ID NO:277 (having the sequence of LGS); and a CDR3 comprising the amino acid sequence of SEQ ID NO:278. In some aspects, L1-L16 comprise the amino acid sequence of any one of SEQ ID NOs:1-34, wherein SEQ ID NO:1 has the amino acid sequence of G, SEQ ID NO:2 has the amino acid sequence of A, SEQ ID NO:3 has the amino acid sequence of GSS and SEQ ID NO:4 has the amino acid sequence of ASG. In some aspects, L1 or L4 and L7 or L10 comprise the amino acid sequence of SEQ ID NO:6; L2 or L5 and L8 or L11 comprise the amino acid sequence of SEQ ID NO: 27; and L3 or L6 and L9 or L12 comprise the amino acid sequence of SEQ ID NO:6. In some aspects, L1 or L5 and L9 or L13 comprise the amino acid sequence of SEQ ID NO:6; L2 or L6 and L10 or L14 comprise the amino acid sequence of SEQ ID NO:27; L3 or L7 and L11 or L15 comprise the amino acid sequence of SEQ ID NO:6; and L4 or L8 and L12 or L16 comprise the amino acid sequence of SEQ ID NO:12. In some aspects, Fc comprises a knob-into-hole modification or Fc effector function knockout mutation. In some aspects, Fc comprises an amino acid sequence having at least 80%, at least 85%, at least 90%, at least 91%, at least 92%, at least 93%, at least 94%, at least 95%, at least 96%, at least 97%, at least 98%, at least 99%, or 100% identity to SEQ ID NO:293 or 294. In some aspects, Fc comprises the amino acid sequence of SEQ ID NO:293 or 294. In some preferred aspects, CDR1, CDR2 and CDR3 of each of VH1, VH2, VH3, VH4, VL1, VL2, VL3 and VL4 have at least 90% identity with the corresponding amino acid sequences specified above, optionally with (i) an Fc having at least 90% identity with the corresponding amino acid sequence recited above; and/or (ii) one or more linker sequence as specified above. In some particularly preferred aspects, CDR1, CDR2 and CDR3 of each of VH1, VH2, VH3, VH4, VL1, VL2, VL3 and VL4 comprise or consist of the corresponding amino acid sequences specified above, optionally with (i) an Fc comprising or consisting of the corresponding amino acid sequence recited above; and/or (ii) one or more linker sequence as specified above.

[0672] In some aspects, (i) VH1 comprises a CDR1 comprising an amino acid sequence having at least 80%, at least 85%, at least 90%, at least 91%, at least 92%, at least 93%, at least 94%, at least 95%, at least 96%, at least 97%, at least 98%, at least 99% or 100% identity to SEQ ID NO:272; a CDR2 comprising an amino acid sequence having at least 80%, at least 85%, at least 90%, at least 91%, at least 92%, at least 93%, at least 94%, at least 95%, at least 96%, at least 97%, at least 98%, at least 99% or 100% identity to SEQ ID NO:273; and a CDR3 comprising an amino acid sequence having at least 80%, at least 85%, at least 90%, at least 91%, at least 92%, at least 93%, at least 94%, at least 95%, at least 96%, at least 97%, at least 98%, at least 99% or 100% identity to SEQ ID NO:274; (ii) VH2 and VH3 comprise a CDR1 comprising an amino acid sequence having at least 80%, at least 85%, at least 90%, at least 91%, at least 92%, at least 93%, at least 94%, at least 95%, at least 96%, at least 97%, at least 98%, at least 99% or 100% identity to SEQ ID NO:280; a CDR2 comprising an amino acid sequence having at least 80%, at least 85%, at least 90%, at least 91%, at least 92%, at least 93%, at least 94%, at least 95%, at least 96%, at least 97%, at least 98%, at least 99% or 100% identity to SEQ ID NO:281; and a CDR3 comprising an amino acid sequence having at least 80%, at least 85%, at least 90%, at least 91%, at least 92%, at least 93%, at least 94%, at least 95%, at least 96%, at least 97%, at least 98%, at least 99% or 100% identity to SEQ ID NO:282; (iii) VH4 comprises a CDR1 comprising an amino acid sequence having at least 80%, at least 85%, at least 90%, at least 91%, at least 92%, at least 93%, at least 94%, at least 95%, at least 96%, at least 97%, at least 98%, at least 99% or 100% identity to SEQ ID NO:59; a CDR2 comprising an amino acid sequence having at least 80%, at least 85%, at least 90%, at least 91%, at least 92%, at least 93%, at least 94%, at least 95%, at least 96%, at least 97%, at least 98%, at least 99% or 100% identity to SEQ ID NO:60; and a CDR3 comprising an amino acid sequence having at least 80%, at least 85%, at least 90%, at least 91%, at least 92%, at least 93%, at least 94%, at least 95%, at least 96%, at least 97%, at least 98%, at least 99% or 100% identity to SEQ ID NO:61; (iv) VL1 comprises a CDR1 comprising an amino acid sequence having at least 80%, at least 85%, at least 90%, at least 91%, at least 92%, at least 93%, at least 94%, at least 95%, at least 96%, at least 97%, at least 98%, at least 99% or 100% identity to SEQ ID NO:268; a CDR2 comprising an amino acid sequence having at least 80%, at least 85%, at least 90%, at least 91%, at least 92%, at least 93%, at least 94%, at least 95%, at least 96%, at least 97%, at least 98%, at least 99% or 100% identity to SEQ ID NO:269 (having the sequence of GAS); and a CDR3 comprising an amino acid sequence having at least 80%, at least 85%, at least 90%, at least 91%, at least 92%, at least 93%, at least 94%, at least 95%, at least 96%, at least 97%, at least 98%, at least 99% or 100% identity to SEQ ID NO:270; (v) VL2 and VL3 comprise a CDR1 comprising an amino acid sequence having at least 80%, at least 85%, at least 90%, at least 91%, at least 92%, at least 93%, at least 94%, at least 95%, at least 96%, at least 97%, at least 98%, at least 99% or 100% identity to SEQ ID NO:276; a CDR2 comprising an amino acid sequence having at least 80%, at least 85%, at least 90%, at least 91%, at least 92%, at least 93%, at least 94%, at least 95%, at least 96%, at least 97%, at least 98%, at least 99% or 100% identity to SEQ ID NO:277 (having the sequence of LGS); and a CDR3 comprising an amino acid sequence having at least 80%, at least 85%, at least 90%, at least 91%, at least 92%, at least 93%, at least 94%, at least 95%, at least 96%, at least 97%, at least 98%, at least 99% or 100% identity to SEQ ID NO:278; and (vi) VL4 comprises a CDR1 comprising an amino acid sequence having at least 80%, at least 85%, at least 90%, at least 91%, at least 92%, at least 93%, at least 94%, at least 95%, at least 96%, at least 97%, at least 98%, at least 99% or 100% identity to SEQ ID NO:55; a CDR2 comprising an amino acid sequence having at least 80%, at least 85%, at least 90%, at least 91%, at least 92%, at least 93%, at least 94%, at least 95%, at least 96%, at least 97%, at least 98%, at least 99% or 100% identity to SEQ ID NO:56 (having the sequence of GTN); and a CDR3 comprising an amino acid sequence having at least 80%, at least 85%, at least 90%, at least 91%, at least 92%, at least 93%, at least 94%, at least 95%, at least 96%, at least 97%, at least 98%, at least 99% or 100% identity to SEQ ID NO:57. In some aspects, (i) VH1 comprises a CDR1 comprising the amino acid sequence of SEQ ID NO:272; a CDR2 comprising the amino acid sequence of SEQ ID NO:273; and a CDR3 comprising the amino acid sequence of SEQ ID NO:274; (ii) VH2 and VH3 comprise a CDR1 comprising the amino acid sequence of SEQ ID NO:280; a CDR2 comprising the amino acid sequence of SEQ ID NO:281; and a CDR3 comprising the amino acid sequence of SEQ ID NO:282; (iii) VH4 comprises a CDR1 comprising the amino acid sequence of SEQ ID NO:59; a CDR2 comprising the amino acid sequence of SEQ ID NO:60; and a CDR3 comprising the amino acid sequence of SEQ ID NO:61; (iv) VL1 comprises a CDR1 comprising the amino acid sequence of SEQ ID NO:268; a CDR2 comprising the amino acid sequence of SEQ ID NO:269 (having the sequence of GAS); and a CDR3 comprising the amino acid sequence of SEQ ID NO:270; (v) VL2 and VL3 comprise a CDR1 comprising the amino acid sequence of SEQ ID NO:276; a CDR2 comprising the amino acid sequence of SEQ ID NO:277 (having the sequence of LGS); and a CDR3 comprising the amino acid sequence of SEQ ID NO:278; and (vi) VL4 comprises a CDR1 comprising the amino acid sequence of SEQ ID NO:55; a CDR2 comprising the amino acid sequence of SEQ ID NO:56 (having the sequence of GTN); and a CDR3 comprising the amino acid sequence of SEQ ID NO:57. In some aspects, L1-L16 comprise the amino acid sequence of any one of SEQ ID NOs:1-34, wherein SEQ ID NO:1 has the amino acid sequence of G, SEQ ID NO:2 has the amino acid sequence of A, SEQ ID NO:3 has the amino acid sequence of GSS and SEQ ID NO:4 has the amino acid sequence of ASG. In some aspects, L1 or L4 and L7 or L10 comprise the amino acid sequence of SEQ ID NO:6; L2 or L5 and L8 or L11 comprise the amino acid sequence of SEQ ID NO:27; and L3 or L6 and L9 or L12 comprise the amino acid sequence of SEQ ID NO:6. In some aspects, L1 or L5 and L9 or L13 comprise the amino acid sequence of SEQ ID NO:6; L2 or L6 and L10 or L14 comprise the amino acid sequence of SEQ ID NO:27; L3 or L7 and L11 or L15 comprise the amino acid sequence of SEQ ID NO:6; and L4 or L8 and L12 or L16 comprise the amino acid sequence of SEQ ID NO:12. In some aspects, Fc comprises a knob-into-hole modification or Fc effector function knockout mutation. In some aspects, Fc comprises an amino acid sequence having at least 80%, at least 85%, at least 90%, at least 91%, at least 92%, at least 93%, at least 94%, at least 95%, at least 96%, at least 97%, at least 98%, at least 99%, or 100% identity to SEQ ID NO:293 or 294. In some aspects, Fc comprises the amino acid sequence of SEQ ID NO:293 or 294. In some preferred aspects, CDR1, CDR2 and CDR3 of each of VH1, VH2, VH3, VH4, VL1, VL2, VL3 and VL4 have at least 90% identity with the corresponding amino acid sequences specified above, optionally with (i) an Fc having at least 90% identity with the corresponding amino acid sequence recited above; and/or (ii) one or more linker sequence as specified above. In some particularly preferred aspects, CDR1, CDR2 and CDR3 of each of VH1, VH2, VH3, VH4, VL1, VL2, VL3 and VL4 comprise or consist of the corresponding amino acid sequences specified above, optionally with (i) an Fc comprising or consisting of the corresponding amino acid sequence recited above; and/or (ii) one or more linker sequence as specified above.

[0673] In some aspects, (i) VH2 comprises a CDR1 comprising an amino acid sequence having at least 80%, at least 85%, at least 90%, at least 91%, at least 92%, at least 93%, at least 94%, at least 95%, at least 96%, at least 97%, at least 98%, at least 99% or 100% identity to SEQ ID NO:272; a CDR2 comprising an amino acid sequence having at least 80%, at least 85%, at least 90%, at least 91%, at least 92%, at least 93%, at least 94%, at least 95%, at least 96%, at least 97%, at least 98%, at least 99% or 100% identity to SEQ ID NO:273; and a CDR3 comprising an amino acid sequence having at least 80%, at least 85%, at least 90%, at least 91%, at least 92%, at least 93%, at least 94%, at least 95%, at least 96%, at least 97%, at least 98%, at least 99% or 100% identity to SEQ ID NO:274; (ii) VH1 and VH3 comprise a CDR1 comprising an amino acid sequence having at least 80%, at least 85%, at least 90%, at least 91%, at least 92%, at least 93%, at least 94%, at least 95%, at least 96%, at least 97%, at least 98%, at least 99% or 100% identity to SEQ ID NO:280; a CDR2 comprising an amino acid sequence having at least 80%, at least 85%, at least 90%, at least 91%, at least 92%, at least 93%, at least 94%, at least 95%, at least 96%, at least 97%, at least 98%, at least 99% or 100% identity to SEQ ID NO:281; and a CDR3 comprising an amino acid sequence having at least 80%, at least 85%, at least 90%, at least 91%, at least 92%, at least 93%, at least 94%, at least 95%, at least 96%, at least 97%, at least 98%, at least 99% or 100% identity to SEQ ID NO:282; (iii) VH4 comprises a CDR1 comprising an amino acid sequence having at least 80%, at least 85%, at least 90%, at least 91%, at least 92%, at least 93%, at least 94%, at least 95%, at least 96%, at least 97%, at least 98%, at least 99% or 100% identity to SEQ ID NO:59; a CDR2 comprising an amino acid sequence having at least 80%, at least 85%, at least 90%, at least 91%, at least 92%, at least 93%, at least 94%, at least 95%, at least 96%, at least 97%, at least 98%, at least 99% or 100% identity to SEQ ID NO:60; and a CDR3 comprising an amino acid sequence having at least 80%, at least 85%, at least 90%, at least 91%, at least 92%, at least 93%, at least 94%, at least 95%, at least 96%, at least 97%, at least 98%, at least 99% or 100% identity to SEQ ID NO:61; (iv) VL2 comprises a CDR1 comprising an amino acid sequence having at least 80%, at least 85%, at least 90%, at least 91%, at least 92%, at least 93%, at least 94%, at least 95%, at least 96%, at least 97%, at least 98%, at least 99% or 100% identity to SEQ ID NO:268; a CDR2 comprising an amino acid sequence having at least 80%, at least 85%, at least 90%, at least 91%, at least 92%, at least 93%, at least 94%, at least 95%, at least 96%, at least 97%, at least 98%, at least 99% or 100% identity to SEQ ID NO:269 (having the sequence of GAS); and a CDR3 comprising an amino acid sequence having at least 80%, at least 85%, at least 90%, at least 91%, at least 92%, at least 93%, at least 94%, at least 95%, at least 96%, at least 97%, at least 98%, at least 99% or 100% identity to SEQ ID NO:270; (v) VL1 and VL3 comprise a CDR1 comprising an amino acid sequence having at least 80%, at least 85%, at least 90%, at least 91%, at least 92%, at least 93%, at least 94%, at least 95%, at least 96%, at least 97%, at least 98%, at least 99% or 100% identity to SEQ ID NO:276; a CDR2 comprising an amino acid sequence having at least 80%, at least 85%, at least 90%, at least 91%, at least 92%, at least 93%, at least 94%, at least 95%, at least 96%, at least 97%, at least 98%, at least 99% or 100% identity to SEQ ID NO:277 (having the sequence of LGS); and a CDR3 comprising an amino acid sequence having at least 80%, at least 85%, at least 90%, at least 91%, at least 92%, at least 93%, at least 94%, at least 95%, at least 96%, at least 97%, at least 98%, at least 99% or 100% identity to SEQ ID NO:278; and (vi) VL4 comprises a CDR1 comprising an amino acid sequence having at least 80%, at least 85%, at least 90%, at least 91%, at least 92%, at least 93%, at least 94%, at least 95%, at least 96%, at least 97%, at least 98%, at least 99% or 100% identity to SEQ ID NO:55; a CDR2 comprising an amino acid sequence having at least 80%, at least 85%, at least 90%, at least 91%, at least 92%, at least 93%, at least 94%, at least 95%, at least 96%, at least 97%, at least 98%, at least 99% or 100% identity to SEQ ID NO:56 (having the sequence of GTN); and a CDR3 comprising an amino acid sequence having at least 80%, at least 85%, at least 90%, at least 91%, at least 92%, at least 93%, at least 94%, at least 95%, at least 96%, at least 97%, at least 98%, at least 99% or 100% identity to SEQ ID NO:57. In some aspects, (i) VH2 comprises a CDR1 comprising the amino acid sequence of SEQ ID NO:272; a CDR2 comprising the amino acid sequence of SEQ ID NO:273; and a CDR3 comprising the amino acid sequence of SEQ ID NO:274; (ii) VH1 and VH3 comprise a CDR1 comprising the amino acid sequence of SEQ ID NO:280; a CDR2 comprising the amino acid sequence of SEQ ID NO:281; and a CDR3 comprising the amino acid sequence of SEQ ID NO:282; (iii) VH4 comprises a CDR1 comprising the amino acid sequence of SEQ ID NO:59; a CDR2 comprising the amino acid sequence of SEQ ID NO:60; and a CDR3 comprising the amino acid sequence of SEQ ID NO:61; (iv) VL2 comprises a CDR1 comprising the amino acid sequence of SEQ ID NO:268; a CDR2 comprising the amino acid sequence of SEQ ID NO:269 (having the sequence of GAS); and a CDR3 comprising the amino acid sequence of SEQ ID NO:270; (v) VL1 and VL3 comprise a CDR1 comprising the amino acid sequence of SEQ ID NO:276; a CDR2 comprising the amino acid sequence of SEQ ID NO:277 (having the sequence of LGS); and a CDR3 comprising the amino acid sequence of SEQ ID NO:278; and (vi) VL4 comprises a CDR1 comprising the amino acid sequence of SEQ ID NO:55; a CDR2 comprising the amino acid sequence of SEQ ID NO:56 (having the sequence of GTN); and a CDR3 comprising the amino acid sequence of SEQ ID NO:57. In some aspects, L1-L16 comprise the amino acid sequence of any one of SEQ ID NOs:1-34. In some aspects, L1 or L4 and L7 or L10 comprise the amino acid sequence of SEQ ID NO:6; L2 or L5 and L8 or L11 comprise the amino acid sequence of SEQ ID NO:27; and L3 or L6 and L9 or L12 comprise the amino acid sequence of SEQ ID NO:6. In some aspects, L1 or L5 and L9 or L13 comprise the amino acid sequence of SEQ ID NO:6; L2 or L6 and L10 or L14 comprise the amino acid sequence of SEQ ID NO:27; L3 or L7 and L11 or L15 comprise the amino acid sequence of SEQ ID NO:6; and L4 or L8 and L12 or L16 comprise the amino acid sequence of SEQ ID NO:12. In some aspects, Fc comprises a knob-into-hole modification or Fc effector function knockout mutation. In some aspects, Fc comprises an amino acid sequence having at least 80%, at least 85%, at least 90%, at least 91%, at least 92%, at least 93%, at least 94%, at least 95%, at least 96%, at least 97%, at least 98%, at least 99%, or 100% identity to SEQ ID NO:293 or 294. In some aspects, Fc comprises the amino acid sequence of SEQ ID NO:293 or 294. In some preferred aspects, CDR1, CDR2 and CDR3 of each of VH1, VH2, VH3, VH4, VL1, VL2, VL3 and VL4 have at least 90% identity with the corresponding amino acid sequences specified above, optionally with (i) an Fe having at least 90% identity with the corresponding amino acid sequence recited above; and/or (ii) one or more linker sequence as specified above. In some particularly preferred aspects, CDR1, CDR2 and CDR3 of each of VH1, VH2, VH3, VH4, VL1, VL2, VL3 and VL4 comprise or consist of the corresponding amino acid sequences specified above, optionally with (i) an Fc comprising or consisting of the corresponding amino acid sequence recited above; and/or (ii) one or more linker sequence as specified above.

[0674] In some aspects, (i) VH1 comprises a CDR1 comprising an amino acid sequence having at least 80%, at least 85%, at least 90%, at least 91%, at least 92%, at least 93%, at least 94%, at least 95%, at least 96%, at least 97%, at least 98%, at least 99% or 100% identity to SEQ ID NO:59; a CDR2 comprising an amino acid sequence having at least 80%, at least 85%, at least 90%, at least 91%, at least 92%, at least 93%, at least 94%, at least 95%, at least 96%, at least 97%, at least 98%, at least 99% or 100% identity to SEQ ID NO:60; and a CDR3 comprising an amino acid sequence having at least 80%, at least 85%, at least 90%, at least 91%, at least 92%, at least 93%, at least 94%, at least 95%, at least 96%, at least 97%, at least 98%, at least 99% or 100% identity to SEQ ID NO:61; (ii) VH2 and VH4 comprise a CDR1 comprising an amino acid sequence having at least 80%, at least 85%, at least 90%, at least 91%, at least 92%, at least 93%, at least 94%, at least 95%, at least 96%, at least 97%, at least 98%, at least 99% or 100% identity to SEQ ID NO:280; a CDR2 comprising an amino acid sequence having at least 80%, at least 85%, at least 90%, at least 91%, at least 92%, at least 93%, at least 94%, at least 95%, at least 96%, at least 97%, at least 98%, at least 99% or 100% identity to SEQ ID NO:281; and a CDR3 comprising an amino acid sequence having at least 80%, at least 85%, at least 90%, at least 91%, at least 92%, at least 93%, at least 94%, at least 95%, at least 96%, at least 97%, at least 98%, at least 99% or 100% identity to SEQ ID NO:282; (iii) VH3 comprises a CDR1 comprising an amino acid sequence having at least 80%, at least 85%, at least 90%, at least 91%, at least 92%, at least 93%, at least 94%, at least 95%, at least 96%, at least 97%, at least 98%, at least 99% or 100% identity to SEQ ID NO:272; a CDR2 comprising an amino acid sequence having at least 80%, at least 85%, at least 90%, at least 91%, at least 92%, at least 93%, at least 94%, at least 95%, at least 96%, at least 97%, at least 98%, at least 99% or 100% identity to SEQ ID NO:273; and a CDR3 comprising an amino acid sequence having at least 80%, at least 85%, at least 90%, at least 91%, at least 92%, at least 93%, at least 94%, at least 95%, at least 96%, at least 97%, at least 98%, at least 99% or 100% identity to SEQ ID NO:274; (iv) VL1 comprises a CDR1 comprising an amino acid sequence having at least 80%, at least 85%, at least 90%, at least 91%, at least 92%, at least 93%, at least 94%, at least 95%, at least 96%, at least 97%, at least 98%, at least 99% or 100% identity to SEQ ID NO:55; a CDR2 comprising an amino acid sequence having at least 80%, at least 85%, at least 90%, at least 91%, at least 92%, at least 93%, at least 94%, at least 95%, at least 96%, at least 97%, at least 98%, at least 99% or 100% identity to SEQ ID NO:56 (having the sequence of GTN); and a CDR3 comprising an amino acid sequence having at least 80%, at least 85%, at least 90%, at least 91%, at least 92%, at least 93%, at least 94%, at least 95%, at least 96%, at least 97%, at least 98%, at least 99% or 100% identity to SEQ ID NO:57; (v) VL2 and VL4 comprise a CDR1 comprising an amino acid sequence having at least 80%, at least 85%, at least 90%, at least 91%, at least 92%, at least 93%, at least 94%, at least 95%, at least 96%, at least 97%, at least 98%, at least 99% or 100% identity to SEQ ID NO:276; a CDR2 comprising an amino acid sequence having at least 80%, at least 85%, at least 90%, at least 91%, at least 92%, at least 93%, at least 94%, at least 95%, at least 96%, at least 97%, at least 98%, at least 99% or 100% identity to SEQ ID NO:277 (having the sequence of LGS); and a CDR3 comprising an amino acid sequence having at least 80%, at least 85%, at least 90%, at least 91%, at least 92%, at least 93%, at least 94%, at least 95%, at least 96%, at least 97%, at least 98%, at least 99% or 100% identity to SEQ ID NO:278; and (vi) VL3 comprises a CDR1 comprising an amino acid sequence having at least 80%, at least 85%, at least 90%, at least 91%, at least 92%, at least 93%, at least 94%, at least 95%, at least 96%, at least 97%, at least 98%, at least 99% or 100% identity to SEQ ID NO:268; a CDR2 comprising an amino acid sequence having at least 80%, at least 85%, at least 90%, at least 91%, at least 92%, at least 93%, at least 94%, at least 95%, at least 96%, at least 97%, at least 98%, at least 99% or 100% identity to SEQ ID NO:269 (having the sequence of GAS); and a CDR3 comprising an amino acid sequence having at least 80%, at least 85%, at least 90%, at least 91%, at least 92%, at least 93%, at least 94%, at least 95%, at least 96%, at least 97%, at least 98%, at least 99% or 100% identity to SEQ ID NO:270. In some aspects, (i) VH1 comprises a CDR1 comprising the amino acid sequence of SEQ ID NO:59; a CDR2 comprising the amino acid sequence of SEQ ID NO:60; and a CDR3 comprising the amino acid sequence of SEQ ID NO:61; (ii) VH2 and VH4 comprise a CDR1 comprising the amino acid sequence of SEQ ID NO:280; a CDR2 comprising the amino acid sequence of SEQ ID NO:281; and a CDR3 comprising the amino acid sequence of SEQ ID NO:282; (iii) VH3 comprises a CDR1 comprising the amino acid sequence of SEQ ID NO:272; a CDR2 comprising the amino acid sequence of SEQ ID NO:273; and a CDR3 comprising the amino acid sequence of SEQ ID NO:274; (iv) VL1 comprises a CDR1 comprising the amino acid sequence of SEQ ID NO:55; a CDR2 comprising the amino acid sequence of SEQ ID NO:56 (having the sequence of GTN); and a CDR3 comprising the amino acid sequence of SEQ ID NO:57; (v) VL2 and VL4 comprise a CDR1 comprising the amino acid sequence of SEQ ID NO:276; a CDR2 comprising the amino acid sequence of SEQ ID NO:277 (having the sequence of LGS); and a CDR3 comprising the amino acid sequence of SEQ ID NO:278; and (vi) VL3 comprises a CDR1 comprising the amino acid sequence of SEQ ID NO:268; a CDR2 comprising the amino acid sequence of SEQ ID NO:269 (having the sequence of GAS); and a CDR3 comprising the amino acid sequence of SEQ ID NO:270. In some aspects, L1-L16 comprise the amino acid sequence of any one of, wherein SEQ ID NO:1 has the amino acid sequence of G, SEQ ID NO:2 has the amino acid sequence of A, SEQ ID NO:3 has the amino acid sequence of GSS and SEQ ID NO:4 has the amino acid sequence of ASG. In some aspects, L1 or L4 and L7 or L10 comprise the amino acid sequence of SEQ ID NO:6; L2 or L5 and L8 or L11 comprise the amino acid sequence of SEQ ID NO:27; and L3 or L6 and L9 or L12 comprise the amino acid sequence of SEQ ID NO:6. In some aspects, L1 or L5 and L9 or L13 comprise the amino acid sequence of SEQ ID NO:6; L2 or L6 and L10 or L14 comprise the amino acid sequence of SEQ ID NO:27; L3 or L7 and L11 or L15 comprise the amino acid sequence of SEQ ID NO:6; and L4 or L8 and L12 or L16 comprise the amino acid sequence of SEQ ID NO:12. In some aspects, Fc comprises a knob-into-hole modification or Fc effector function knockout mutation. In some aspects, Fc comprises an amino acid sequence having at least 80%, at least 85%, at least 90%, at least 91%, at least 92%, at least 93%, at least 94%, at least 95%, at least 96%, at least 97%, at least 98%, at least 99%, or 100% identity to SEQ ID NO:293 or 294. In some aspects, Fc comprises the amino acid sequence of SEQ ID NO:293 or 294. In some preferred aspects, CDR1, CDR2 and CDR3 of each of VH1, VH2, VH3, VH4, VL1, VL2, VL3 and VL4 have at least 90% identity with the corresponding amino acid sequences specified above, optionally with (i) an Fc having at least 90% identity with the corresponding amino acid sequence recited above; and/or (ii) one or more linker sequence as specified above. In some particularly preferred aspects, CDR1, CDR2 and CDR3 of each of VH1, VH2, VH3, VH4, VL1, VL2, VL3 and VL4 comprise or consist of the corresponding amino acid sequences specified above, optionally with (i) an Fc comprising or consisting of the corresponding amino acid sequence recited above; and/or (ii) one or more linker sequence as specified above.

[0675] In some aspects, (i) VH1 comprises a CDR1 comprising an amino acid sequence having at least 80%, at least 85%, at least 90%, at least 91%, at least 92%, at least 93%, at least 94%, at least 95%, at least 96%, at least 97%, at least 98%, at least 99% or 100% identity to SEQ ID NO:59; a CDR2 comprising an amino acid sequence having at least 80%, at least 85%, at least 90%, at least 91%, at least 92%, at least 93%, at least 94%, at least 95%, at least 96%, at least 97%, at least 98%, at least 99% or 100% identity to SEQ ID NO:60; and a CDR3 comprising an amino acid sequence having at least 80%, at least 85%, at least 90%, at least 91%, at least 92%, at least 93%, at least 94%, at least 95%, at least 96%, at least 97%, at least 98%, at least 99% or 100% identity to SEQ ID NO:61; (ii) VH2 and VH3 comprise a CDR1 comprising an amino acid sequence having at least 80%, at least 85%, at least 90%, at least 91%, at least 92%, at least 93%, at least 94%, at least 95%, at least 96%, at least 97%, at least 98%, at least 99% or 100% identity to SEQ ID NO:280; a CDR2 comprising an amino acid sequence having at least 80%, at least 85%, at least 90%, at least 91%, at least 92%, at least 93%, at least 94%, at least 95%, at least 96%, at least 97%, at least 98%, at least 99% or 100% identity to SEQ ID NO:281; and a CDR3 comprising an amino acid sequence having at least 80%, at least 85%, at least 90%, at least 91%, at least 92%, at least 93%, at least 94%, at least 95%, at least 96%, at least 97%, at least 98%, at least 99% or 100% identity to SEQ ID NO:282; (iii) VH4 comprises a CDR1 comprising an amino acid sequence having at least 80%, at least 85%, at least 90%, at least 91%, at least 92%, at least 93%, at least 94%, at least 95%, at least 96%, at least 97%, at least 98%, at least 99% or 100% identity to SEQ ID NO:272; a CDR2 comprising an amino acid sequence having at least 80%, at least 85%, at least 90%, at least 91%, at least 92%, at least 93%, at least 94%, at least 95%, at least 96%, at least 97%, at least 98%, at least 99% or 100% identity to SEQ ID NO:273; and a CDR3 comprising an amino acid sequence having at least 80%, at least 85%, at least 90%, at least 91%, at least 92%, at least 93%, at least 94%, at least 95%, at least 96%, at least 97%, at least 98%, at least 99% or 100% identity to SEQ ID NO:274; (iv) VL1 comprises a CDR1 comprising an amino acid sequence having at least 80%, at least 85%, at least 90%, at least 91%, at least 92%, at least 93%, at least 94%, at least 95%, at least 96%, at least 97%, at least 98%, at least 99% or 100% identity to SEQ ID NO:55; a CDR2 comprising an amino acid sequence having at least 80%, at least 85%, at least 90%, at least 91%, at least 92%, at least 93%, at least 94%, at least 95%, at least 96%, at least 97%, at least 98%, at least 99% or 100% identity to SEQ ID NO:56 (having the sequence of GTN); and a CDR3 comprising an amino acid sequence having at least 80%, at least 85%, at least 90%, at least 91%, at least 92%, at least 93%, at least 94%, at least 95%, at least 96%, at least 97%, at least 98%, at least 99% or 100% identity to SEQ ID NO:57; (v) VL2 and VL3 comprise a CDR1 comprising an amino acid sequence having at least 80%, at least 85%, at least 90%, at least 91%, at least 92%, at least 93%, at least 94%, at least 95%, at least 96%, at least 97%, at least 98%, at least 99% or 100% identity to SEQ ID NO:276; a CDR2 comprising an amino acid sequence having at least 80%, at least 85%, at least 90%, at least 91%, at least 92%, at least 93%, at least 94%, at least 95%, at least 96%, at least 97%, at least 98%, at least 99% or 100% identity to SEQ ID NO:277 (having the sequence of LGS); and a CDR3 comprising an amino acid sequence having at least 80%, at least 85%, at least 90%, at least 91%, at least 92%, at least 93%, at least 94%, at least 95%, at least 96%, at least 97%, at least 98%, at least 99% or 100% identity to SEQ ID NO:278; and (vi) VL4 comprises a CDR1 comprising an amino acid sequence having at least 80%, at least 85%, at least 90%, at least 91%, at least 92%, at least 93%, at least 94%, at least 95%, at least 96%, at least 97%, at least 98%, at least 99% or 100% identity to SEQ ID NO:268; a CDR2 comprising an amino acid sequence having at least 80%, at least 85%, at least 90%, at least 91%, at least 92%, at least 93%, at least 94%, at least 95%, at least 96%, at least 97%, at least 98%, at least 99% or 100% identity to SEQ ID NO:269 (having the sequence of GAS); and a CDR3 comprising an amino acid sequence having at least 80%, at least 85%, at least 90%, at least 91%, at least 92%, at least 93%, at least 94%, at least 95%, at least 96%, at least 97%, at least 98%, at least 99% or 100% identity to SEQ ID NO:270. In some aspects, (i) VH1 comprises a CDR1 comprising the amino acid sequence of SEQ ID NO:59; a CDR2 comprising the amino acid sequence of SEQ ID NO:60; and a CDR3 comprising the amino acid sequence of SEQ ID NO:61; (ii) VH2 and VH3 comprise a CDR1 comprising the amino acid sequence of SEQ ID NO:280; a CDR2 comprising the amino acid sequence of SEQ ID NO:281; and a CDR3 comprising the amino acid sequence of SEQ ID NO:282; (iii) VH4 comprises a CDR1 comprising the amino acid sequence of SEQ ID NO:272; a CDR2 comprising the amino acid sequence of SEQ ID NO:273; and a CDR3 comprising the amino acid sequence of SEQ ID NO:274; (iv) VL1 comprises a CDR1 comprising the amino acid sequence of SEQ ID NO:55; a CDR2 comprising the amino acid sequence of SEQ ID NO:56 (having the sequence of GTN); and a CDR3 comprising the amino acid sequence of SEQ ID NO:57; (v) VL2 and VL3 comprise a CDR1 comprising the amino acid sequence of SEQ ID NO:276; a CDR2 comprising the amino acid sequence of SEQ ID NO:277 (having the sequence of LGS); and a CDR3 comprising the amino acid sequence of SEQ ID NO:278; and (vi) VL4 comprises a CDR1 comprising the amino acid sequence of SEQ ID NO:268; a CDR2 comprising the amino acid sequence of SEQ ID NO:269 (having the sequence of GAS); and a CDR3 comprising the amino acid sequence of SEQ ID NO:270. In some aspects, L1-L16 comprise the amino acid sequence of any one of SEQ ID NOs:1-34, wherein SEQ ID NO:1 has the amino acid sequence of G, SEQ ID NO:2 has the amino acid sequence of A, SEQ ID NO:3 has the amino acid sequence of GSS and SEQ ID NO:4 has the amino acid sequence of ASG. In some aspects, L1 or L4 and L7 or L10 comprise the amino acid sequence of SEQ ID NO:6; L2 or L5 and L8 or L11 comprise the amino acid sequence of SEQ ID NO:27; and L3 or L6 and L9 or L12 comprise the amino acid sequence of SEQ ID NO:6. In some aspects, L1 or L5 and L9 or L13 comprise the amino acid sequence of SEQ ID NO:6; L2 or L6 and L10 or L14 comprise the amino acid sequence of SEQ ID NO:27; L3 or L7 and L11 or L15 comprise the amino acid sequence of SEQ ID NO:6; and L4 or L8 and L12 or L16 comprise the amino acid sequence of SEQ ID NO:12. In some aspects, Fc comprises a knob-into-hole modification or Fc effector function knockout mutation. In some aspects, Fc comprises an amino acid sequence having at least 80%, at least 85%, at least 90%, at least 91%, at least 92%, at least 93%, at least 94%, at least 95%, at least 96%, at least 97%, at least 98%, at least 99%, or 100% identity to SEQ ID NO:293 or 294. In some aspects, Fc comprises the amino acid sequence of SEQ ID NO:293 or 294. In some preferred aspects, CDR1, CDR2 and CDR3 of each of VH1, VH2, VH3, VH4, VL1, VL2, VL3 and VL4 have at least 90% identity with the corresponding amino acid sequences specified above, optionally with (i) an Fc having at least 90% identity with the corresponding amino acid sequence recited above; and/or (ii) one or more linker sequence as specified above. In some particularly preferred aspects, CDR1, CDR2 and CDR3 of each of VH1, VH2, VH3, VH4, VL1, VL2, VL3 and VL4 comprise or consist of the corresponding amino acid sequences specified above, optionally with (i) an Fc comprising or consisting of the corresponding amino acid sequence recited above; and/or (ii) one or more linker sequence as specified above.

[0676] In some aspects, (i) VH1 comprises a CDR1 comprising an amino acid sequence having at least 80%, at least 85%, at least 90%, at least 91%, at least 92%, at least 93%, at least 94%, at least 95%, at least 96%, at least 97%, at least 98%, at least 99% or 100% identity to SEQ ID NO:59; a CDR2 comprising an amino acid sequence having at least 80%, at least 85%, at least 90%, at least 91%, at least 92%, at least 93%, at least 94%, at least 95%, at least 96%, at least 97%, at least 98%, at least 99% or 100% identity to SEQ ID NO:60; and a CDR3 comprising an amino acid sequence having at least 80%, at least 85%, at least 90%, at least 91%, at least 92%, at least 93%, at least 94%, at least 95%, at least 96%, at least 97%, at least 98%, at least 99% or 100% identity to SEQ ID NO:61; (ii) VH2 and VH3 comprise a CDR1 comprising an amino acid sequence having at least 80%, at least 85%, at least 90%, at least 91%, at least 92%, at least 93%, at least 94%, at least 95%, at least 96%, at least 97%, at least 98%, at least 99% or 100% identity to SEQ ID NO:288; a CDR2 comprising an amino acid sequence having at least 80%, at least 85%, at least 90%, at least 91%, at least 92%, at least 93%, at least 94%, at least 95%, at least 96%, at least 97%, at least 98%, at least 99% or 100% identity to SEQ ID NO:289; and a CDR3 comprising an amino acid sequence having at least 80%, at least 85%, at least 90%, at least 91%, at least 92%, at least 93%, at least 94%, at least 95%, at least 96%, at least 97%, at least 98%, at least 99% or 100% identity to SEQ ID NO:290; (iii) VH4 comprises a CDR1 comprising an amino acid sequence having at least 80%, at least 85%, at least 90%, at least 91%, at least 92%, at least 93%, at least 94%, at least 95%, at least 96%, at least 97%, at least 98%, at least 99% or 100% identity to SEQ ID NO:280; a CDR2 comprising an amino acid sequence having at least 80%, at least 85%, at least 90%, at least 91%, at least 92%, at least 93%, at least 94%, at least 95%, at least 96%, at least 97%, at least 98%, at least 99% or 100% identity to SEQ ID NO:281; and a CDR3 comprising an amino acid sequence having at least 80%, at least 85%, at least 90%, at least 91%, at least 92%, at least 93%, at least 94%, at least 95%, at least 96%, at least 97%, at least 98%, at least 99% or 100% identity to SEQ ID NO:282; (iv) VL1 comprises a CDR1 comprising an amino acid sequence having at least 80%, at least 85%, at least 90%, at least 91%, at least 92%, at least 93%, at least 94%, at least 95%, at least 96%, at least 97%, at least 98%, at least 99% or 100% identity to SEQ ID NO:55; a CDR2 comprising an amino acid sequence having at least 80%, at least 85%, at least 90%, at least 91%, at least 92%, at least 93%, at least 94%, at least 95%, at least 96%, at least 97%, at least 98%, at least 99% or 100% identity to SEQ ID NO:56 (having the sequence of GTN); and a CDR3 comprising an amino acid sequence having at least 80%, at least 85%, at least 90%, at least 91%, at least 92%, at least 93%, at least 94%, at least 95%, at least 96%, at least 97%, at least 98%, at least 99% or 100% identity to SEQ ID NO:57; (v) VL2 and VL3 comprise a CDR1 comprising an amino acid sequence having at least 80%, at least 85%, at least 90%, at least 91%, at least 92%, at least 93%, at least 94%, at least 95%, at least 96%, at least 97%, at least 98%, at least 99% or 100% identity to SEQ ID NO:284; a CDR2 comprising an amino acid sequence having at least 80%, at least 85%, at least 90%, at least 91%, at least 92%, at least 93%, at least 94%, at least 95%, at least 96%, at least 97%, at least 98%, at least 99% or 100% identity to SEQ ID NO:285; and a CDR3 comprising an amino acid sequence having at least 80%, at least 85%, at least 90%, at least 91%, at least 92%, at least 93%, at least 94%, at least 95%, at least 96%, at least 97%, at least 98%, at least 99% or 100% identity to SEQ ID NO:286; and (vi) VL4 comprises a CDR1 comprising an amino acid sequence having at least 80%, at least 85%, at least 90%, at least 91%, at least 92%, at least 93%, at least 94%, at least 95%, at least 96%, at least 97%, at least 98%, at least 99% or 100% identity to SEQ ID NO:276; a CDR2 comprising an amino acid sequence having at least 80%, at least 85%, at least 90%, at least 91%, at least 92%, at least 93%, at least 94%, at least 95%, at least 96%, at least 97%, at least 98%, at least 99% or 100% identity to SEQ ID NO:277 (having the sequence of LGS); and a CDR3 comprising an amino acid sequence having at least 80%, at least 85%, at least 90%, at least 91%, at least 92%, at least 93%, at least 94%, at least 95%, at least 96%, at least 97%, at least 98%, at least 99% or 100% identity to SEQ ID NO:278. In some aspects, (i) VH1 comprises a CDR1 comprising the amino acid sequence of SEQ ID NO:59; a CDR2 comprising the amino acid sequence of SEQ ID NO:60; and a CDR3 comprising the amino acid sequence of SEQ ID NO:61; (ii) VH2 and VH3 comprise a CDR1 comprising the amino acid sequence of SEQ ID NO:288; a CDR2 comprising the amino acid sequence of SEQ ID NO:289; and a CDR3 comprising the amino acid sequence of SEQ ID NO:290; (iii) VH4 comprises a CDR1 comprising the amino acid sequence of SEQ ID NO:280; a CDR2 comprising the amino acid sequence of SEQ ID NO:281; and a CDR3 comprising the amino acid sequence of SEQ ID NO:282; (iv) VL1 comprises a CDR1 comprising the amino acid sequence of SEQ ID NO:55; a CDR2 comprising the amino acid sequence of SEQ ID NO:56 (having the sequence of GTN); and a CDR3 comprising the amino acid sequence of SEQ ID NO:57; (v) VL2 and VL3 comprise a CDR1 comprising the amino acid sequence of SEQ ID NO:284; a CDR2 comprising the amino acid sequence of SEQ ID NO:285; and a CDR3 comprising the amino acid sequence of SEQ ID NO:286; and (vi) VL4 comprises a CDR1 comprising the amino acid sequence of SEQ ID NO:276; a CDR2 comprising the amino acid sequence of SEQ ID NO:277 (having the sequence of LGS); and a CDR3 comprising the amino acid sequence of SEQ ID NO:278. In some aspects, L1-L16 comprise the amino acid sequence of any one of SEQ ID NOs:1-34, wherein SEQ ID NO:1 has the amino acid sequence of G, SEQ ID NO:2 has the amino acid sequence of A, SEQ ID NO:3 has the amino acid sequence of GSS and SEQ ID NO:4 has the amino acid sequence of ASG. In some aspects, L1 or L4 and L7 or L10 comprise the amino acid sequence of SEQ ID NO:6; L2 or L5 and L8 or L11 comprise the amino acid sequence of SEQ ID NO:27; and L3 or L6 and L9 or L12 comprise the amino acid sequence of SEQ ID NO:6. In some aspects, L1 or L5 and L9 or L13 comprise the amino acid sequence of SEQ ID NO:6; L2 or L6 and L10 or L14 comprise the amino acid sequence of SEQ ID NO:27; L3 or L7 and L11 or L15 comprise the amino acid sequence of SEQ ID NO:6; and L4 or L8 and L12 or L16 comprise the amino acid sequence of SEQ ID NO:12. In some aspects, Fc comprises a knob-into-hole modification or Fc effector function knockout mutation. In some aspects, Fc comprises an amino acid sequence having at least 80%, at least 85%, at least 90%, at least 91%, at least 92%, at least 93%, at least 94%, at least 95%, at least 96%, at least 97%, at least 98%, at least 99%, or 100% identity to SEQ ID NO:293 or 294. In some aspects, Fc comprises the amino acid sequence of SEQ ID NO:293 or 294. In some preferred aspects, CDR1, CDR2 and CDR3 of each of VH1, VH2, VH3, VH4, VL1, VL2, VL3 and VL4 have at least 90% identity with the corresponding amino acid sequences specified above, optionally with (i) an Fc having at least 90% identity with the corresponding amino acid sequence recited above; and/or (ii) one or more linker sequence as specified above. In some particularly preferred aspects, CDR1, CDR2 and CDR3 of each of VH1, VH2, VH3, VH4, VL1, VL2, VL3 and VL4 comprise or consist of the corresponding amino acid sequences specified above, optionally with (i) an Fc comprising or consisting of the corresponding amino acid sequence recited above; and/or (ii) one or more linker sequence as specified above.

[0677] In some aspects, (i) VH1 comprises a CDR1 comprising an amino acid sequence having at least 80%, at least 85%, at least 90%, at least 91%, at least 92%, at least 93%, at least 94%, at least 95%, at least 96%, at least 97%, at least 98%, at least 99% or 100% identity to SEQ ID NO:59; a CDR2 comprising an amino acid sequence having at least 80%, at least 85%, at least 90%, at least 91%, at least 92%, at least 93%, at least 94%, at least 95%, at least 96%, at least 97%, at least 98%, at least 99% or 100% identity to SEQ ID NO:60; and a CDR3 comprising an amino acid sequence having at least 80%, at least 85%, at least 90%, at least 91%, at least 92%, at least 93%, at least 94%, at least 95%, at least 96%, at least 97%, at least 98%, at least 99% or 100% identity to SEQ ID NO:61; (ii) VH2 and VH4 comprise a CDR1 comprising an amino acid sequence having at least 80%, at least 85%, at least 90%, at least 91%, at least 92%, at least 93%, at least 94%, at least 95%, at least 96%, at least 97%, at least 98%, at least 99% or 100% identity to SEQ ID NO:288; a CDR2 comprising an amino acid sequence having at least 80%, at least 85%, at least 90%, at least 91%, at least 92%, at least 93%, at least 94%, at least 95%, at least 96%, at least 97%, at least 98%, at least 99% or 100% identity to SEQ ID NO:289; and a CDR3 comprising an amino acid sequence having at least 80%, at least 85%, at least 90%, at least 91%, at least 92%, at least 93%, at least 94%, at least 95%, at least 96%, at least 97%, at least 98%, at least 99% or 100% identity to SEQ ID NO:290; (iii) VH3 comprises a CDR1 comprising an amino acid sequence having at least 80%, at least 85%, at least 90%, at least 91%, at least 92%, at least 93%, at least 94%, at least 95%, at least 96%, at least 97%, at least 98%, at least 99% or 100% identity to SEQ ID NO:280; a CDR2 comprising an amino acid sequence having at least 80%, at least 85%, at least 90%, at least 91%, at least 92%, at least 93%, at least 94%, at least 95%, at least 96%, at least 97%, at least 98%, at least 99% or 100% identity to SEQ ID NO:281; and a CDR3 comprising an amino acid sequence having at least 80%, at least 85%, at least 90%, at least 91%, at least 92%, at least 93%, at least 94%, at least 95%, at least 96%, at least 97%, at least 98%, at least 99% or 100% identity to SEQ ID NO:282; (iv) VL1 comprises a CDR1 comprising an amino acid sequence having at least 80%, at least 85%, at least 90%, at least 91%, at least 92%, at least 93%, at least 94%, at least 95%, at least 96%, at least 97%, at least 98%, at least 99% or 100% identity to SEQ ID NO:55; a CDR2 comprising an amino acid sequence having at least 80%, at least 85%, at least 90%, at least 91%, at least 92%, at least 93%, at least 94%, at least 95%, at least 96%, at least 97%, at least 98%, at least 99% or 100% identity to SEQ ID NO:56 (having the sequence of GTN); and a CDR3 comprising an amino acid sequence having at least 80%, at least 85%, at least 90%, at least 91%, at least 92%, at least 93%, at least 94%, at least 95%, at least 96%, at least 97%, at least 98%, at least 99% or 100% identity to SEQ ID NO:57; (v) VL2 and VL4 comprise a CDR1 comprising an amino acid sequence having at least 80%, at least 85%, at least 90%, at least 91%, at least 92%, at least 93%, at least 94%, at least 95%, at least 96%, at least 97%, at least 98%, at least 99% or 100% identity to SEQ ID NO:284; a CDR2 comprising an amino acid sequence having at least 80%, at least 85%, at least 90%, at least 91%, at least 92%, at least 93%, at least 94%, at least 95%, at least 96%, at least 97%, at least 98%, at least 99% or 100% identity to SEQ ID NO:285; and a CDR3 comprising an amino acid sequence having at least 80%, at least 85%, at least 90%, at least 91%, at least 92%, at least 93%, at least 94%, at least 95%, at least 96%, at least 97%, at least 98%, at least 99% or 100% identity to SEQ ID NO:286; and (vi) VL3 comprises a CDR1 comprising an amino acid sequence having at least 80%, at least 85%, at least 90%, at least 91%, at least 92%, at least 93%, at least 94%, at least 95%, at least 96%, at least 97%, at least 98%, at least 99% or 100% identity to SEQ ID NO:276; a CDR2 comprising an amino acid sequence having at least 80%, at least 85%, at least 90%, at least 91%, at least 92%, at least 93%, at least 94%, at least 95%, at least 96%, at least 97%, at least 98%, at least 99% or 100% identity to SEQ ID NO:277 (having the sequence of LGS); and a CDR3 comprising an amino acid sequence having at least 80%, at least 85%, at least 90%, at least 91%, at least 92%, at least 93%, at least 94%, at least 95%, at least 96%, at least 97%, at least 98%, at least 99% or 100% identity to SEQ ID NO:278. In some aspects, (i) VH1 comprises a CDR1 comprising the amino acid sequence of SEQ ID NO:59; a CDR2 comprising the amino acid sequence of SEQ ID NO:60; and a CDR3 comprising the amino acid sequence of SEQ ID NO:61; (ii) VH2 and VH4 comprise a CDR1 comprising the amino acid sequence of SEQ ID NO:288; a CDR2 comprising the amino acid sequence of SEQ ID NO:289; and a CDR3 comprising the amino acid sequence of SEQ ID NO:290; (iii) VH3 comprises a CDR1 comprising the amino acid sequence of SEQ ID NO:280; a CDR2 comprising the amino acid sequence of SEQ ID NO:281; and a CDR3 comprising the amino acid sequence of SEQ ID NO:282; (iv) VL1 comprises a CDR1 comprising the amino acid sequence of SEQ ID NO:55; a CDR2 comprising the amino acid sequence of SEQ ID NO:56 (having the sequence of GTN); and a CDR3 comprising the amino acid sequence of SEQ ID NO:57; (v) VL2 and VL4 comprise a CDR1 comprising the amino acid sequence of SEQ ID NO:284; a CDR2 comprising the amino acid sequence of SEQ ID NO:285; and a CDR3 comprising the amino acid sequence of SEQ ID NO:286; and (vi) VL3 comprises a CDR1 comprising the amino acid sequence of SEQ ID NO:276; a CDR2 comprising the amino acid sequence of SEQ ID NO:277 (having the sequence of LGS); and a CDR3 comprising the amino acid sequence of SEQ ID NO:278. In some aspects, L1-L16 comprise the amino acid sequence of any one of SEQ ID NOs:1-34, wherein SEQ ID NO:1 has the amino acid sequence of G, SEQ ID NO:2 has the amino acid sequence of A, SEQ ID NO:3 has the amino acid sequence of GSS and SEQ ID NO:4 has the amino acid sequence of ASG. In some aspects, L1 or L4 and L7 or L10 comprise the amino acid sequence of SEQ ID NO:6; L2 or L5 and L8 or L11 comprise the amino acid sequence of SEQ ID NO:27; and L3 or L6 and L9 or L12 comprise the amino acid sequence of SEQ ID NO:6. In some aspects, L1 or L5 and L9 or L13 comprise the amino acid sequence of SEQ ID NO:6; L2 or L6 and L10 or L14 comprise the amino acid sequence of SEQ ID NO:27; L3 or L7 and L11 or L15 comprise the amino acid sequence of SEQ ID NO:6; and L4 or L8 and L12 or L16 comprise the amino acid sequence of SEQ ID NO:12. In some aspects, Fc comprises a knob-into-hole modification or Fc effector function knockout mutation. In some aspects, Fc comprises an amino acid sequence having at least 80%, at least 85%, at least 90%, at least 91%, at least 92%, at least 93%, at least 94%, at least 95%, at least 96%, at least 97%, at least 98%, at least 99%, or 100% identity to SEQ ID NO:293 or 294. In some aspects, Fc comprises the amino acid sequence of SEQ ID NO:293 or 294. In some preferred aspects, CDR1, CDR2 and CDR3 of each of VH1, VH2, VH3, VH4, VL1, VL2, VL3 and VL4 have at least 90% identity with the corresponding amino acid sequences specified above, optionally with (i) an Fc having at least 90% identity with the corresponding amino acid sequence recited above; and/or (ii) one or more linker sequence as specified above. In some particularly preferred aspects, CDR1, CDR2 and CDR3 of each of VH1, VH2, VH3, VH4, VL1, VL2, VL3 and VL4 comprise or consist of the corresponding amino acid sequences specified above, optionally with (i) an Fc comprising or consisting of the corresponding amino acid sequence recited above; and/or (ii) one or more linker sequence as specified above.

[0678] In some aspects, (i) VH1 and VH3 comprise a CDR1 comprising an amino acid sequence having at least 80%, at least 85%, at least 90%, at least 91%, at least 92%, at least 93%, at least 94%, at least 95%, at least 96%, at least 97%, at least 98%, at least 99% or 100% identity to SEQ ID NO:288; a CDR2 comprising an amino acid sequence having at least 80%, at least 85%, at least 90%, at least 91%, at least 92%, at least 93%, at least 94%, at least 95%, at least 96%, at least 97%, at least 98%, at least 99% or 100% identity to SEQ ID NO:289; and a CDR3 comprising an amino acid sequence having at least 80%, at least 85%, at least 90%, at least 91%, at least 92%, at least 93%, at least 94%, at least 95%, at least 96%, at least 97%, at least 98%, at least 99% or 100% identity to SEQ ID NO:290; (ii) VH2 comprises a CDR1 comprising an amino acid sequence having at least 80%, at least 85%, at least 90%, at least 91%, at least 92%, at least 93%, at least 94%, at least 95%, at least 96%, at least 97%, at least 98%, at least 99% or 100% identity to SEQ ID NO:59; a CDR2 comprising an amino acid sequence having at least 80%, at least 85%, at least 90%, at least 91%, at least 92%, at least 93%, at least 94%, at least 95%, at least 96%, at least 97%, at least 98%, at least 99% or 100% identity to SEQ ID NO:60; and a CDR3 comprising an amino acid sequence having at least 80%, at least 85%, at least 90%, at least 91%, at least 92%, at least 93%, at least 94%, at least 95%, at least 96%, at least 97%, at least 98%, at least 99% or 100% identity to SEQ ID NO:61; (iii) VH4 comprises a CDR1 comprising an amino acid sequence having at least 80%, at least 85%, at least 90%, at least 91%, at least 92%, at least 93%, at least 94%, at least 95%, at least 96%, at least 97%, at least 98%, at least 99% or 100% identity to SEQ ID NO:280; a CDR2 comprising an amino acid sequence having at least 80%, at least 85%, at least 90%, at least 91%, at least 92%, at least 93%, at least 94%, at least 95%, at least 96%, at least 97%, at least 98%, at least 99% or 100% identity to SEQ ID NO:281; and a CDR3 comprising an amino acid sequence having at least 80%, at least 85%, at least 90%, at least 91%, at least 92%, at least 93%, at least 94%, at least 95%, at least 96%, at least 97%, at least 98%, at least 99% or 100% identity to SEQ ID NO:282; (iv) VL1 and VL3 comprise a CDR1 comprising an amino acid sequence having at least 80%, at least 85%, at least 90%, at least 91%, at least 92%, at least 93%, at least 94%, at least 95%, at least 96%, at least 97%, at least 98%, at least 99% or 100% identity to SEQ ID NO:284; a CDR2 comprising an amino acid sequence having at least 80%, at least 85%, at least 90%, at least 91%, at least 92%, at least 93%, at least 94%, at least 95%, at least 96%, at least 97%, at least 98%, at least 99% or 100% identity to SEQ ID NO:285; and a CDR3 comprising an amino acid sequence having at least 80%, at least 85%, at least 90%, at least 91%, at least 92%, at least 93%, at least 94%, at least 95%, at least 96%, at least 97%, at least 98%, at least 99% or 100% identity to SEQ ID NO:286; (v) VL2 comprises a CDR1 comprising an amino acid sequence having at least 80%, at least 85%, at least 90%, at least 91%, at least 92%, at least 93%, at least 94%, at least 95%, at least 96%, at least 97%, at least 98%, at least 99% or 100% identity to SEQ ID NO:55; a CDR2 comprising an amino acid sequence having at least 80%, at least 85%, at least 90%, at least 91%, at least 92%, at least 93%, at least 94%, at least 95%, at least 96%, at least 97%, at least 98%, at least 99% or 100% identity to SEQ ID NO:56 (having the sequence of GTN); and a CDR3 comprising an amino acid sequence having at least 80%, at least 85%, at least 90%, at least 91%, at least 92%, at least 93%, at least 94%, at least 95%, at least 96%, at least 97%, at least 98%, at least 99% or 100% identity to SEQ ID NO:57; and (vi) VL4 comprises a CDR1 comprising an amino acid sequence having at least 80%, at least 85%, at least 90%, at least 91%, at least 92%, at least 93%, at least 94%, at least 95%, at least 96%, at least 97%, at least 98%, at least 99% or 100% identity to SEQ ID NO:276; a CDR2 comprising an amino acid sequence having at least 80%, at least 85%, at least 90%, at least 91%, at least 92%, at least 93%, at least 94%, at least 95%, at least 96%, at least 97%, at least 98%, at least 99% or 100% identity to SEQ ID NO:277 (having the sequence of LGS); and a CDR3 comprising an amino acid sequence having at least 80%, at least 85%, at least 90%, at least 91%, at least 92%, at least 93%, at least 94%, at least 95%, at least 96%, at least 97%, at least 98%, at least 99% or 100% identity to SEQ ID NO:278. In some aspects, (i) VH1 and VH3 comprise a CDR1 comprising the amino acid sequence of SEQ ID NO:288; a CDR2 comprising the amino acid sequence of SEQ ID NO:289; and a CDR3 comprising the amino acid sequence of SEQ ID NO:290; (ii) VH2 comprises a CDR1 comprising the amino acid sequence of SEQ ID NO:59; a CDR2 comprising the amino acid sequence of SEQ ID NO:60 and a CDR3 comprising the amino acid sequence of SEQ ID NO:61; (iii) VH4 comprises a CDR1 comprising the amino acid sequence of SEQ ID NO:280; a CDR2 comprising the amino acid sequence of SEQ ID NO:281; and a CDR3 comprising the amino acid sequence of SEQ ID NO:282; (iv) VL1 and VL3 comprise a CDR1 comprising the amino acid sequence of SEQ ID NO:284; a CDR2 comprising the amino acid sequence of SEQ ID NO:285; and a CDR3 comprising the amino acid sequence of SEQ ID NO:286; (v) VL2 comprises a CDR1 comprising the amino acid sequence of SEQ ID NO:55; a CDR2 comprising the amino acid sequence of SEQ ID NO:56 (having the sequence of GTN); and a CDR3 comprising the amino acid sequence of SEQ ID NO:57; and (vi) VL4 comprises a CDR1 comprising the amino acid sequence of SEQ ID NO:276; a CDR2 comprising the amino acid sequence of SEQ ID NO:277 (having the sequence of LGS); and a CDR3 comprising the amino acid sequence of SEQ ID NO:278. In some aspects, L1-L16 comprise the amino acid sequence of any one of SEQ ID NOs:1-34, wherein SEQ ID NO:1 has the amino acid sequence of G, SEQ ID NO:2 has the amino acid sequence of A, SEQ ID NO:3 has the amino acid sequence of GSS and SEQ ID NO:4 has the amino acid sequence of ASG. In some aspects, L1 or L4 and L7 or L10 comprise the amino acid sequence of SEQ ID NO:6; L2 or L5 and L8 or L11 comprise the amino acid sequence of SEQ ID NO:27; and L3 or L6 and L9 or L12 comprise the amino acid sequence of SEQ ID NO:6. In some aspects, L1 or L5 and L9 or L13 comprise the amino acid sequence of SEQ ID NO:6; L2 or L6 and L10 or L14 comprise the amino acid sequence of SEQ ID NO:27; L3 or L7 and L11 or L15 comprise the amino acid sequence of SEQ ID NO:6; and L4 or L8 and L12 or L16 comprise the amino acid sequence of SEQ ID NO:12. In some aspects, Fc comprises a knob-into-hole modification or Fc effector function knockout mutation. In some aspects, Fc comprises an amino acid sequence having at least 80%, at least 85%, at least 90%, at least 91%, at least 92%, at least 93%, at least 94%, at least 95%, at least 96%, at least 97%, at least 98%, at least 99%, or 100% identity to SEQ ID NO:293 or 294. In some aspects, Fc comprises the amino acid sequence of SEQ ID NO:293 or 294. In some preferred aspects, CDR1, CDR2 and CDR3 of each of VH1, VH2, VH3, VH4, VL1, VL2, VL3 and VL4 have at least 90% identity with the corresponding amino acid sequences specified above, optionally with (i) an Fc having at least 90% identity with the corresponding amino acid sequence recited above; and/or (ii) one or more linker sequence as specified above. In some particularly preferred aspects, CDR1, CDR2 and CDR3 of each of VH1, VH2, VH3, VH4, VL1, VL2, VL3 and VL4 comprise or consist of the corresponding amino acid sequences specified above, optionally with (i) an Fc comprising or consisting of the corresponding amino acid sequence recited above; and/or (ii) one or more linker sequence as specified above.

[0679] In some aspects, (i) VH1 and VH4 comprise a CDR1 comprising an amino acid sequence having at least 80%, at least 85%, at least 90%, at least 91%, at least 92%, at least 93%, at least 94%, at least 95%, at least 96%, at least 97%, at least 98%, at least 99% or 100% identity to SEQ ID NO:288; a CDR2 comprising an amino acid sequence having at least 80%, at least 85%, at least 90%, at least 91%, at least 92%, at least 93%, at least 94%, at least 95%, at least 96%, at least 97%, at least 98%, at least 99% or 100% identity to SEQ ID NO:289; and a CDR3 comprising an amino acid sequence having at least 80%, at least 85%, at least 90%, at least 91%, at least 92%, at least 93%, at least 94%, at least 95%, at least 96%, at least 97%, at least 98%, at least 99% or 100% identity to SEQ ID NO:290; (ii) VH2 comprises a CDR1 comprising an amino acid sequence having at least 80%, at least 85%, at least 90%, at least 91%, at least 92%, at least 93%, at least 94%, at least 95%, at least 96%, at least 97%, at least 98%, at least 99% or 100% identity to SEQ ID NO:59; a CDR2 comprising an amino acid sequence having at least 80%, at least 85%, at least 90%, at least 91%, at least 92%, at least 93%, at least 94%, at least 95%, at least 96%, at least 97%, at least 98%, at least 99% or 100% identity to SEQ ID NO:60; and a CDR3 comprising an amino acid sequence having at least 80%, at least 85%, at least 90%, at least 91%, at least 92%, at least 93%, at least 94%, at least 95%, at least 96%, at least 97%, at least 98%, at least 99% or 100% identity to SEQ ID NO:61; (iii) VH3 comprises a CDR1 comprising an amino acid sequence having at least 80%, at least 85%, at least 90%, at least 91%, at least 92%, at least 93%, at least 94%, at least 95%, at least 96%, at least 97%, at least 98%, at least 99% or 100% identity to SEQ ID NO:280; a CDR2 comprising an amino acid sequence having at least 80%, at least 85%, at least 90%, at least 91%, at least 92%, at least 93%, at least 94%, at least 95%, at least 96%, at least 97%, at least 98%, at least 99% or 100% identity to SEQ ID NO:281; and a CDR3 comprising an amino acid sequence having at least 80%, at least 85%, at least 90%, at least 91%, at least 92%, at least 93%, at least 94%, at least 95%, at least 96%, at least 97%, at least 98%, at least 99% or 100% identity to SEQ ID NO:282; (iv) VL1 and VL4 comprise a CDR1 comprising an amino acid sequence having at least 80%, at least 85%, at least 90%, at least 91%, at least 92%, at least 93%, at least 94%, at least 95%, at least 96%, at least 97%, at least 98%, at least 99% or 100% identity to SEQ ID NO:284; a CDR2 comprising an amino acid sequence having at least 80%, at least 85%, at least 90%, at least 91%, at least 92%, at least 93%, at least 94%, at least 95%, at least 96%, at least 97%, at least 98%, at least 99% or 100% identity to SEQ ID NO:285; and a CDR3 comprising an amino acid sequence having at least 80%, at least 85%, at least 90%, at least 91%, at least 92%, at least 93%, at least 94%, at least 95%, at least 96%, at least 97%, at least 98%, at least 99% or 100% identity to SEQ ID NO:286; (v) VL2 comprises a CDR1 comprising an amino acid sequence having at least 80%, at least 85%, at least 90%, at least 91%, at least 92%, at least 93%, at least 94%, at least 95%, at least 96%, at least 97%, at least 98%, at least 99% or 100% identity to SEQ ID NO:55; a CDR2 comprising an amino acid sequence having at least 80%, at least 85%, at least 90%, at least 91%, at least 92%, at least 93%, at least 94%, at least 95%, at least 96%, at least 97%, at least 98%, at least 99% or 100% identity to SEQ ID NO:56 (having the sequence of GTN); and a CDR3 comprising an amino acid sequence having at least 80%, at least 85%, at least 90%, at least 91%, at least 92%, at least 93%, at least 94%, at least 95%, at least 96%, at least 97%, at least 98%, at least 99% or 100% identity to SEQ ID NO:57; and (vi) VL3 comprises a CDR1 comprising an amino acid sequence having at least 80%, at least 85%, at least 90%, at least 91%, at least 92%, at least 93%, at least 94%, at least 95%, at least 96%, at least 97%, at least 98%, at least 99% or 100% identity to SEQ ID NO:276; a CDR2 comprising an amino acid sequence having at least 80%, at least 85%, at least 90%, at least 91%, at least 92%, at least 93%, at least 94%, at least 95%, at least 96%, at least 97%, at least 98%, at least 99% or 100% identity to SEQ ID NO:277 (having the sequence of LGS); and a CDR3 comprising an amino acid sequence having at least 80%, at least 85%, at least 90%, at least 91%, at least 92%, at least 93%, at least 94%, at least 95%, at least 96%, at least 97%, at least 98%, at least 99% or 100% identity to SEQ ID NO:278. In some aspects, (i) VH1 and VH4 comprise a CDR1 comprising the amino acid sequence of SEQ ID NO:288; a CDR2 comprising the amino acid sequence of SEQ ID NO:289; and a CDR3 comprising the amino acid sequence of SEQ ID NO:290; (ii) VH2 comprises a CDR1 comprising the amino acid sequence of SEQ ID NO:59; a CDR2 comprising the amino acid sequence of SEQ ID NO:60 and a CDR3 comprising the amino acid sequence of SEQ ID NO:61; (iii) VH3 comprises a CDR1 comprising the amino acid sequence of SEQ ID NO:280; a CDR2 comprising the amino acid sequence of SEQ ID NO:281; and a CDR3 comprising the amino acid sequence of SEQ ID NO:282; (iv) VL1 and VL4 comprise a CDR1 comprising the amino acid sequence of SEQ ID NO:284; a CDR2 comprising the amino acid sequence of SEQ ID NO:285; and a CDR3 comprising the amino acid sequence of SEQ ID NO:286; (v) VL2 comprises a CDR1 comprising the amino acid sequence of SEQ ID NO:55; a CDR2 comprising the amino acid sequence of SEQ ID NO:56 (having the sequence of GTN); and a CDR3 comprising the amino acid sequence of SEQ ID NO:57; and (vi) VL3 comprises a CDR1 comprising the amino acid sequence of SEQ ID NO:276; a CDR2 comprising the amino acid sequence of SEQ ID NO:277 (having the sequence of LGS); and a CDR3 comprising the amino acid sequence of SEQ ID NO:278. In some aspects, L1-L16 comprise the amino acid sequence of any one of SEQ ID NOs:1-34, wherein SEQ ID NO:1 has the amino acid sequence of G, SEQ ID NO:2 has the amino acid sequence of A, SEQ ID NO:3 has the amino acid sequence of GSS and SEQ ID NO:4 has the amino acid sequence of ASG. In some aspects, L1 or L4 and L7 or L10 comprise the amino acid sequence of SEQ ID NO:6; L2 or L5 and L8 or L11 comprise the amino acid sequence of SEQ ID NO:27; and L3 or L6 and L9 or L12 comprise the amino acid sequence of SEQ ID NO:6. In some aspects, L1 or L5 and L9 or L13 comprise the amino acid sequence of SEQ ID NO:6; L2 or L6 and L10 or L14 comprise the amino acid sequence of SEQ ID NO:27; L3 or L7 and L11 or L15 comprise the amino acid sequence of SEQ ID NO:6; and L4 or L8 and L12 or L16 comprise the amino acid sequence of SEQ ID NO:12. In some aspects, Fc comprises a knob-into-hole modification or Fc effector function knockout mutation. In some aspects, Fc comprises an amino acid sequence having at least 80%, at least 85%, at least 90%, at least 91%, at least 92%, at least 93%, at least 94%, at least 95%, at least 96%, at least 97%, at least 98%, at least 99%, or 100% identity to SEQ ID NO:293 or 294. In some aspects, Fc comprises the amino acid sequence of SEQ ID NO:293 or 294. In some preferred aspects, CDR1, CDR2 and CDR3 of each of VH1, VH2, VH3, VH4, VL1, VL2, VL3 and VL4 have at least 90% identity with the corresponding amino acid sequences specified above, optionally with (i) an Fc having at least 90% identity with the corresponding amino acid sequence recited above; and/or (ii) one or more linker sequence as specified above. In some particularly preferred aspects, CDR1, CDR2 and CDR3 of each of VH1, VH2, VH3, VH4, VL1, VL2, VL3 and VL4 comprise or consist of the corresponding amino acid sequences specified above, optionally with (i) an Fc comprising or consisting of the corresponding amino acid sequence recited above; and/or (ii) one or more linker sequence as specified above.

[0680] In some aspects, (i) VH1 and VH3 comprise a CDR1 comprising an amino acid sequence having at least 80%, at least 85%, at least 90%, at least 91%, at least 92%, at least 93%, at least 94%, at least 95%, at least 96%, at least 97%, at least 98%, at least 99% or 100% identity to SEQ ID NO:59; a CDR2 comprising an amino acid sequence having at least 80%, at least 85%, at least 90%, at least 91%, at least 92%, at least 93%, at least 94%, at least 95%, at least 96%, at least 97%, at least 98%, at least 99% or 100% identity to SEQ ID NO:60; and a CDR3 comprising an amino acid sequence having at least 80%, at least 85%, at least 90%, at least 91%, at least 92%, at least 93%, at least 94%, at least 95%, at least 96%, at least 97%, at least 98%, at least 99% or 100% identity to SEQ ID NO:61; (ii) VH2 comprises a CDR1 comprising an amino acid sequence having at least 80%, at least 85%, at least 90%, at least 91%, at least 92%, at least 93%, at least 94%, at least 95%, at least 96%, at least 97%, at least 98%, at least 99% or 100% identity to SEQ ID NO:288; a CDR2 comprising an amino acid sequence having at least 80%, at least 85%, at least 90%, at least 91%, at least 92%, at least 93%, at least 94%, at least 95%, at least 96%, at least 97%, at least 98%, at least 99% or 100% identity to SEQ ID NO:289; and a CDR3 comprising an amino acid sequence having at least 80%, at least 85%, at least 90%, at least 91%, at least 92%, at least 93%, at least 94%, at least 95%, at least 96%, at least 97%, at least 98%, at least 99% or 100% identity to SEQ ID NO:290; (iii) VH4 comprises a CDR1 comprising an amino acid sequence having at least 80%, at least 85%, at least 90%, at least 91%, at least 92%, at least 93%, at least 94%, at least 95%, at least 96%, at least 97%, at least 98%, at least 99% or 100% identity to SEQ ID NO:280; a CDR2 comprising an amino acid sequence having at least 80%, at least 85%, at least 90%, at least 91%, at least 92%, at least 93%, at least 94%, at least 95%, at least 96%, at least 97%, at least 98%, at least 99% or 100% identity to SEQ ID NO:281; and a CDR3 comprising an amino acid sequence having at least 80%, at least 85%, at least 90%, at least 91%, at least 92%, at least 93%, at least 94%, at least 95%, at least 96%, at least 97%, at least 98%, at least 99% or 100% identity to SEQ ID NO:282; (iv) VL1 and VL3 comprise a CDR1 comprising an amino acid sequence having at least 80%, at least 85%, at least 90%, at least 91%, at least 92%, at least 93%, at least 94%, at least 95%, at least 96%, at least 97%, at least 98%, at least 99% or 100% identity to SEQ ID NO:55; a CDR2 comprising an amino acid sequence having at least 80%, at least 85%, at least 90%, at least 91%, at least 92%, at least 93%, at least 94%, at least 95%, at least 96%, at least 97%, at least 98%, at least 99% or 100% identity to SEQ ID NO:56 (having the sequence of GTN); and a CDR3 comprising an amino acid sequence having at least 80%, at least 85%, at least 90%, at least 91%, at least 92%, at least 93%, at least 94%, at least 95%, at least 96%, at least 97%, at least 98%, at least 99% or 100% identity to SEQ ID NO:57; (v) VL2 comprises a CDR1 comprising an amino acid sequence having at least 80%, at least 85%, at least 90%, at least 91%, at least 92%, at least 93%, at least 94%, at least 95%, at least 96%, at least 97%, at least 98%, at least 99% or 100% identity to SEQ ID NO:284; a CDR2 comprising an amino acid sequence having at least 80%, at least 85%, at least 90%, at least 91%, at least 92%, at least 93%, at least 94%, at least 95%, at least 96%, at least 97%, at least 98%, at least 99% or 100% identity to SEQ ID NO:285; and a CDR3 comprising an amino acid sequence having at least 80%, at least 85%, at least 90%, at least 91%, at least 92%, at least 93%, at least 94%, at least 95%, at least 96%, at least 97%, at least 98%, at least 99% or 100% identity to SEQ ID NO:286; and (vi) VL4 comprises a CDR1 comprising an amino acid sequence having at least 80%, at least 85%, at least 90%, at least 91%, at least 92%, at least 93%, at least 94%, at least 95%, at least 96%, at least 97%, at least 98%, at least 99% or 100% identity to SEQ ID NO:276; a CDR2 comprising an amino acid sequence having at least 80%, at least 85%, at least 90%, at least 91%, at least 92%, at least 93%, at least 94%, at least 95%, at least 96%, at least 97%, at least 98%, at least 99% or 100% identity to SEQ ID NO:277 (having the sequence of LGS); and a CDR3 comprising an amino acid sequence having at least 80%, at least 85%, at least 90%, at least 91%, at least 92%, at least 93%, at least 94%, at least 95%, at least 96%, at least 97%, at least 98%, at least 99% or 100% identity to SEQ ID NO:278. In some aspects, (i) VH1 and VH3 comprise a CDR1 comprising the amino acid sequence of SEQ ID NO:59; a CDR2 comprising the amino acid sequence of SEQ ID NO:60; and a CDR3 comprising the amino acid sequence of SEQ ID NO:61; (ii) VH2 comprises a CDR1 comprising the amino acid sequence of SEQ ID NO:288; a CDR2 comprising the amino acid sequence of SEQ ID NO:289; and a CDR3 comprising the amino acid sequence of SEQ ID NO:290; (iii) VH4 comprises a CDR1 comprising the amino acid sequence of SEQ ID NO:280; a CDR2 comprising the amino acid sequence of SEQ ID NO:281; and a CDR3 comprising the amino acid sequence of SEQ ID NO:282; (iv) VL1 and VL3 comprise a CDR1 comprising the amino acid sequence of SEQ ID NO:55; a CDR2 comprising the amino acid sequence of SEQ ID NO:56 (having the sequence of GTN); and a CDR3 comprising the amino acid sequence of SEQ ID NO:57; (v) VL2 comprises a CDR1 comprising the amino acid sequence of SEQ ID NO:284; a CDR2 comprising the amino acid sequence of SEQ ID NO:285; and a CDR3 comprising the amino acid sequence of SEQ ID NO:286; and (vi) VL4 comprises a CDR1 comprising the amino acid sequence of SEQ ID NO:276; a CDR2 comprising the amino acid sequence of SEQ ID NO:277 (having the sequence of LGS); and a CDR3 comprising the amino acid sequence of SEQ ID NO:278. In some aspects, L1-L16 comprise the amino acid sequence of any one of SEQ ID NOs:1-34, wherein SEQ ID NO:1 has the amino acid sequence of G, SEQ ID NO:2 has the amino acid sequence of A, SEQ ID NO:3 has the amino acid sequence of GSS and SEQ ID NO:4 has the amino acid sequence of ASG. In some aspects, L1 or L4 and L7 or L10 comprise the amino acid sequence of SEQ ID NO:6; L2 or L5 and L8 or L11 comprise the amino acid sequence of SEQ ID NO:27; and L3 or L6 and L9 or L12 comprise the amino acid sequence of SEQ ID NO:6. In some aspects, L1 or L5 and L9 or L13 comprise the amino acid sequence of SEQ ID NO:6; L2 or L6 and L10 or L14 comprise the amino acid sequence of SEQ ID NO:27; L3 or L7 and L11 or L15 comprise the amino acid sequence of SEQ ID NO:6; and L4 or L8 and L12 or L16 comprise the amino acid sequence of SEQ ID NO:12. In some aspects, Fc comprises a knob-into-hole modification or Fc effector function knockout mutation. In some aspects, Fc comprises an amino acid sequence having at least 80%, at least 85%, at least 90%, at least 91%, at least 92%, at least 93%, at least 94%, at least 95%, at least 96%, at least 97%, at least 98%, at least 99%, or 100% identity to SEQ ID NO:293 or 294. In some aspects, Fc comprises the amino acid sequence of SEQ ID NO:293 or 294. In some preferred aspects, CDR1, CDR2 and CDR3 of each of VH1, VH2, VH3, VH4, VL1, VL2, VL3 and VL4 have at least 90% identity with the corresponding amino acid sequences specified above, optionally with (i) an Fc having at least 90% identity with the corresponding amino acid sequence recited above; and/or (ii) one or more linker sequence as specified above. In some particularly preferred aspects, CDR1, CDR2 and CDR3 of each of VH1, VH2, VH3, VH4, VL1, VL2, VL3 and VL4 comprise or consist of the corresponding amino acid sequences specified above, optionally with (i) an Fc comprising or consisting of the corresponding amino acid sequence recited above; and/or (ii) one or more linker sequence as specified above.

[0681] In some aspects, (i) VH1 and VH4 comprise a CDR1 comprising an amino acid sequence having at least 80%, at least 85%, at least 90%, at least 91%, at least 92%, at least 93%, at least 94%, at least 95%, at least 96%, at least 97%, at least 98%, at least 99% or 100% identity to SEQ ID NO:59; a CDR2 comprising an amino acid sequence having at least 80%, at least 85%, at least 90%, at least 91%, at least 92%, at least 93%, at least 94%, at least 95%, at least 96%, at least 97%, at least 98%, at least 99% or 100% identity to SEQ ID NO:60; and a CDR3 comprising an amino acid sequence having at least 80%, at least 85%, at least 90%, at least 91%, at least 92%, at least 93%, at least 94%, at least 95%, at least 96%, at least 97%, at least 98%, at least 99% or 100% identity to SEQ ID NO:61; (ii) VH2 comprises a CDR1 comprising an amino acid sequence having at least 80%, at least 85%, at least 90%, at least 91%, at least 92%, at least 93%, at least 94%, at least 95%, at least 96%, at least 97%, at least 98%, at least 99% or 100% identity to SEQ ID NO:288; a CDR2 comprising an amino acid sequence having at least 80%, at least 85%, at least 90%, at least 91%, at least 92%, at least 93%, at least 94%, at least 95%, at least 96%, at least 97%, at least 98%, at least 99% or 100% identity to SEQ ID NO:289; and a CDR3 comprising an amino acid sequence having at least 80%, at least 85%, at least 90%, at least 91%, at least 92%, at least 93%, at least 94%, at least 95%, at least 96%, at least 97%, at least 98%, at least 99% or 100% identity to SEQ ID NO:290; (iii) VH3 comprises a CDR1 comprising an amino acid sequence having at least 80%, at least 85%, at least 90%, at least 91%, at least 92%, at least 93%, at least 94%, at least 95%, at least 96%, at least 97%, at least 98%, at least 99% or 100% identity to SEQ ID NO:280; a CDR2 comprising an amino acid sequence having at least 80%, at least 85%, at least 90%, at least 91%, at least 92%, at least 93%, at least 94%, at least 95%, at least 96%, at least 97%, at least 98%, at least 99% or 100% identity to SEQ ID NO:281; and a CDR3 comprising an amino acid sequence having at least 80%, at least 85%, at least 90%, at least 91%, at least 92%, at least 93%, at least 94%, at least 95%, at least 96%, at least 97%, at least 98%, at least 99% or 100% identity to SEQ ID NO:282; (iv) VL1 and VL4 comprise a CDR1 comprising an amino acid sequence having at least 80%, at least 85%, at least 90%, at least 91%, at least 92%, at least 93%, at least 94%, at least 95%, at least 96%, at least 97%, at least 98%, at least 99% or 100% identity to SEQ ID NO:55; a CDR2 comprising an amino acid sequence having at least 80%, at least 85%, at least 90%, at least 91%, at least 92%, at least 93%, at least 94%, at least 95%, at least 96%, at least 97%, at least 98%, at least 99% or 100% identity to SEQ ID NO:56 (having the sequence of GTN); and a CDR3 comprising an amino acid sequence having at least 80%, at least 85%, at least 90%, at least 91%, at least 92%, at least 93%, at least 94%, at least 95%, at least 96%, at least 97%, at least 98%, at least 99% or 100% identity to SEQ ID NO:57; (v) VL2 comprises a CDR1 comprising an amino acid sequence having at least 80%, at least 85%, at least 90%, at least 91%, at least 92%, at least 93%, at least 94%, at least 95%, at least 96%, at least 97%, at least 98%, at least 99% or 100% identity to SEQ ID NO:284; a CDR2 comprising an amino acid sequence having at least 80%, at least 85%, at least 90%, at least 91%, at least 92%, at least 93%, at least 94%, at least 95%, at least 96%, at least 97%, at least 98%, at least 99% or 100% identity to SEQ ID NO:285; and a CDR3 comprising an amino acid sequence having at least 80%, at least 85%, at least 90%, at least 91%, at least 92%, at least 93%, at least 94%, at least 95%, at least 96%, at least 97%, at least 98%, at least 99% or 100% identity to SEQ ID NO:286; and (vi) VL3 comprises a CDR1 comprising an amino acid sequence having at least 80%, at least 85%, at least 90%, at least 91%, at least 92%, at least 93%, at least 94%, at least 95%, at least 96%, at least 97%, at least 98%, at least 99% or 100% identity to SEQ ID NO:276; a CDR2 comprising an amino acid sequence having at least 80%, at least 85%, at least 90%, at least 91%, at least 92%, at least 93%, at least 94%, at least 95%, at least 96%, at least 97%, at least 98%, at least 99% or 100% identity to SEQ ID NO:277 (having the sequence of LGS); and a CDR3 comprising an amino acid sequence having at least 80%, at least 85%, at least 90%, at least 91%, at least 92%, at least 93%, at least 94%, at least 95%, at least 96%, at least 97%, at least 98%, at least 99% or 100% identity to SEQ ID NO:278. In some aspects, (i) VH1 and VH4 comprise a CDR1 comprising the amino acid sequence of SEQ ID NO:59; a CDR2 comprising the amino acid sequence of SEQ ID NO:60; and a CDR3 comprising the amino acid sequence of SEQ ID NO:61; (ii) VH2 comprises a CDR1 comprising the amino acid sequence of SEQ ID NO:288; a CDR2 comprising the amino acid sequence of SEQ ID NO:289; and a CDR3 comprising the amino acid sequence of SEQ ID NO:290; (iii) VH3 comprises a CDR1 comprising the amino acid sequence of SEQ ID NO:280; a CDR2 comprising the amino acid sequence of SEQ ID NO:281; and a CDR3 comprising the amino acid sequence of SEQ ID NO:282; (iv) VL1 and VL4 comprise a CDR1 comprising the amino acid sequence of SEQ ID NO:55; a CDR2 comprising the amino acid sequence of SEQ ID NO:56 (having the sequence of GTN); and a CDR3 comprising the amino acid sequence of SEQ ID NO:57; (v) VL2 comprises a CDR1 comprising the amino acid sequence of SEQ ID NO:284; a CDR2 comprising the amino acid sequence of SEQ ID NO:285; and a CDR3 comprising the amino acid sequence of SEQ ID NO:286; and (vi) VL3 comprises a CDR1 comprising the amino acid sequence of SEQ ID NO:276; a CDR2 comprising the amino acid sequence of SEQ ID NO:277 (having the sequence of LGS); and a CDR3 comprising the amino acid sequence of SEQ ID NO:278. In some aspects, L1-L16 comprise the amino acid sequence of any one of SEQ ID NOs:1-34, wherein SEQ ID NO:1 has the amino acid sequence of G, SEQ ID NO:2 has the amino acid sequence of A, SEQ ID NO:3 has the amino acid sequence of GSS and SEQ ID NO:4 has the amino acid sequence of ASG. In some aspects, L1 or L4 and L7 or L10 comprise the amino acid sequence of SEQ ID NO:6; L2 or L5 and L8 or L11 comprise the amino acid sequence of SEQ ID NO:27; and L3 or L6 and L9 or L12 comprise the amino acid sequence of SEQ ID NO:6. In some aspects, L1 or L5 and L9 or L13 comprise the amino acid sequence of SEQ ID NO:6; L2 or L6 and L10 or L14 comprise the amino acid sequence of SEQ ID NO:27; L3 or L7 and L11 or L15 comprise the amino acid sequence of SEQ ID NO:6; and L4 or L8 and L12 or L16 comprise the amino acid sequence of SEQ ID NO:12. In some aspects, Fc comprises a knob-into-hole modification or Fc effector function knockout mutation. In some aspects, Fc comprises an amino acid sequence having at least 80%, at least 85%, at least 90%, at least 91%, at least 92%, at least 93%, at least 94%, at least 95%, at least 96%, at least 97%, at least 98%, at least 99%, or 100% identity to SEQ ID NO:293 or 294. In some aspects, Fc comprises the amino acid sequence of SEQ ID NO:293 or 294. In some preferred aspects, CDR1, CDR2 and CDR3 of each of VH1, VH2, VH3, VH4, VL1, VL2, VL3 and VL4 have at least 90% identity with the corresponding amino acid sequences specified above, optionally with (i) an Fc having at least 90% identity with the corresponding amino acid sequence recited above; and/or (ii) one or more linker sequence as specified above. In some particularly preferred aspects, CDR1, CDR2 and CDR3 of each of VH1, VH2, VH3, VH4, VL1, VL2, VL3 and VL4 comprise or consist of the corresponding amino acid sequences specified above, optionally with (i) an Fc comprising or consisting of the corresponding amino acid sequence recited above; and/or (ii) one or more linker sequence as specified above.

[0682] In some aspects, (i) VH2 and VH3 comprise a CDR1 comprising an amino acid sequence having at least 80%, at least 85%, at least 90%, at least 91%, at least 92%, at least 93%, at least 94%, at least 95%, at least 96%, at least 97%, at least 98%, at least 99% or 100% identity to SEQ ID NO:59; a CDR2 comprising an amino acid sequence having at least 80%, at least 85%, at least 90%, at least 91%, at least 92%, at least 93%, at least 94%, at least 95%, at least 96%, at least 97%, at least 98%, at least 99% or 100% identity to SEQ ID NO:60; and a CDR3 comprising an amino acid sequence having at least 80%, at least 85%, at least 90%, at least 91%, at least 92%, at least 93%, at least 94%, at least 95%, at least 96%, at least 97%, at least 98%, at least 99% or 100% identity to SEQ ID NO:61; (ii) VH1 comprises a CDR1 comprising an amino acid sequence having at least 80%, at least 85%, at least 90%, at least 91%, at least 92%, at least 93%, at least 94%, at least 95%, at least 96%, at least 97%, at least 98%, at least 99% or 100% identity to SEQ ID NO:288; a CDR2 comprising an amino acid sequence having at least 80%, at least 85%, at least 90%, at least 91%, at least 92%, at least 93%, at least 94%, at least 95%, at least 96%, at least 97%, at least 98%, at least 99% or 100% identity to SEQ ID NO:289; and a CDR3 comprising an amino acid sequence having at least 80%, at least 85%, at least 90%, at least 91%, at least 92%, at least 93%, at least 94%, at least 95%, at least 96%, at least 97%, at least 98%, at least 99% or 100% identity to SEQ ID NO:290; (iii) VH4 comprises a CDR1 comprising an amino acid sequence having at least 80%, at least 85%, at least 90%, at least 91%, at least 92%, at least 93%, at least 94%, at least 95%, at least 96%, at least 97%, at least 98%, at least 99% or 100% identity to SEQ ID NO:280; a CDR2 comprising an amino acid sequence having at least 80%, at least 85%, at least 90%, at least 91%, at least 92%, at least 93%, at least 94%, at least 95%, at least 96%, at least 97%, at least 98%, at least 99% or 100% identity to SEQ ID NO:281; and a CDR3 comprising an amino acid sequence having at least 80%, at least 85%, at least 90%, at least 91%, at least 92%, at least 93%, at least 94%, at least 95%, at least 96%, at least 97%, at least 98%, at least 99% or 100% identity to SEQ ID NO:282; (iv) VL2 and VL3 comprise a CDR1 comprising an amino acid sequence having at least 80%, at least 85%, at least 90%, at least 91%, at least 92%, at least 93%, at least 94%, at least 95%, at least 96%, at least 97%, at least 98%, at least 99% or 100% identity to SEQ ID NO:55; a CDR2 comprising an amino acid sequence having at least 80%, at least 85%, at least 90%, at least 91%, at least 92%, at least 93%, at least 94%, at least 95%, at least 96%, at least 97%, at least 98%, at least 99% or 100% identity to SEQ ID NO:56 (having the sequence of GTN); and a CDR3 comprising an amino acid sequence having at least 80%, at least 85%, at least 90%, at least 91%, at least 92%, at least 93%, at least 94%, at least 95%, at least 96%, at least 97%, at least 98%, at least 99% or 100% identity to SEQ ID NO:57; (v) VL1 comprises a CDR1 comprising an amino acid sequence having at least 80%, at least 85%, at least 90%, at least 91%, at least 92%, at least 93%, at least 94%, at least 95%, at least 96%, at least 97%, at least 98%, at least 99% or 100% identity to SEQ ID NO:284; a CDR2 comprising an amino acid sequence having at least 80%, at least 85%, at least 90%, at least 91%, at least 92%, at least 93%, at least 94%, at least 95%, at least 96%, at least 97%, at least 98%, at least 99% or 100% identity to SEQ ID NO:285; and a CDR3 comprising an amino acid sequence having at least 80%, at least 85%, at least 90%, at least 91%, at least 92%, at least 93%, at least 94%, at least 95%, at least 96%, at least 97%, at least 98%, at least 99% or 100% identity to SEQ ID NO:286; and (vi) VL4 comprises a CDR1 comprising an amino acid sequence having at least 80%, at least 85%, at least 90%, at least 91%, at least 92%, at least 93%, at least 94%, at least 95%, at least 96%, at least 97%, at least 98%, at least 99% or 100% identity to SEQ ID NO:276; a CDR2 comprising an amino acid sequence having at least 80%, at least 85%, at least 90%, at least 91%, at least 92%, at least 93%, at least 94%, at least 95%, at least 96%, at least 97%, at least 98%, at least 99% or 100% identity to SEQ ID NO:277 (having the sequence of LGS); and a CDR3 comprising an amino acid sequence having at least 80%, at least 85%, at least 90%, at least 91%, at least 92%, at least 93%, at least 94%, at least 95%, at least 96%, at least 97%, at least 98%, at least 99% or 100% identity to SEQ ID NO:278. In some aspects, (i) VH2 and VH3 comprise a CDR1 comprising the amino acid sequence of SEQ ID NO:59; a CDR2 comprising the amino acid sequence of SEQ ID NO:60; and a CDR3 comprising the amino acid sequence of SEQ ID NO:61; (ii) VH1 comprises a CDR1 comprising the amino acid sequence of SEQ ID NO:288; a CDR2 comprising the amino acid sequence of SEQ ID NO:289; and a CDR3 comprising the amino acid sequence of SEQ ID NO:290; (iii) VH4 comprises a CDR1 comprising the amino acid sequence of SEQ ID NO:280; a CDR2 comprising the amino acid sequence of SEQ ID NO:281; and a CDR3 comprising the amino acid sequence of SEQ ID NO:282; (iv) VL2 and VL3 comprise a CDR1 comprising the amino acid sequence of SEQ ID NO:55; a CDR2 comprising the amino acid sequence of SEQ ID NO:56 (having the sequence of GTN); and a CDR3 comprising the amino acid sequence of SEQ ID NO:57; (v) VL1 comprises a CDR1 comprising the amino acid sequence of SEQ ID NO:284; a CDR2 comprising the amino acid sequence of SEQ ID NO:285; and a CDR3 comprising the amino acid sequence of SEQ ID NO:286; and (vi) VL4 comprises a CDR1 comprising the amino acid sequence of SEQ ID NO:276; a CDR2 comprising the amino acid sequence of SEQ ID NO:277 (having the sequence of LGS); and a CDR3 comprising the amino acid sequence of SEQ ID NO:278. In some aspects, L1-L16 comprise the amino acid sequence of any one of SEQ ID NOs:1-34, wherein SEQ ID NO:1 has the amino acid sequence of G, SEQ ID NO:2 has the amino acid sequence of A, SEQ ID NO:3 has the amino acid sequence of GSS and SEQ ID NO:4 has the amino acid sequence of ASG. In some aspects, L1 or L4 and L7 or L10 comprise the amino acid sequence of SEQ ID NO:6; L2 or L5 and L8 or L11 comprise the amino acid sequence of SEQ ID NO:27; and L3 or L6 and L9 or L12 comprise the amino acid sequence of SEQ ID NO:6. In some aspects, L1 or L5 and L9 or L13 comprise the amino acid sequence of SEQ ID NO:6; L2 or L6 and L10 or L14 comprise the amino acid sequence of SEQ ID NO:27; L3 or L7 and L11 or L15 comprise the amino acid sequence of SEQ ID NO:6; and L4 or L8 and L12 or L16 comprise the amino acid sequence of SEQ ID NO:12. In some aspects, Fc comprises a knob-into-hole modification or Fc effector function knockout mutation. In some aspects, Fc comprises an amino acid sequence having at least 80%, at least 85%, at least 90%, at least 91%, at least 92%, at least 93%, at least 94%, at least 95%, at least 96%, at least 97%, at least 98%, at least 99%, or 100% identity to SEQ ID NO:293 or 294. In some aspects, Fc comprises the amino acid sequence of SEQ ID NO:293 or 294. In some preferred aspects, CDR1, CDR2 and CDR3 of each of VH1, VH2, VH3, VH4, VL1, VL2, VL3 and VL4 have at least 90% identity with the corresponding amino acid sequences specified above, optionally with (i) an Fe having at least 90% identity with the corresponding amino acid sequence recited above; and/or (ii) one or more linker sequence as specified above. In some particularly preferred aspects, CDR1, CDR2 and CDR3 of each of VH1, VH2, VH3, VH4, VL1, VL2, VL3 and VL4 comprise or consist of the corresponding amino acid sequences specified above, optionally with (i) an Fc comprising or consisting of the corresponding amino acid sequence recited above; and/or (ii) one or more linker sequence as specified above.

[0683] In some aspects, (i) VH2 and VH4 comprise a CDR1 comprising an amino acid sequence having at least 80%, at least 85%, at least 90%, at least 91%, at least 92%, at least 93%, at least 94%, at least 95%, at least 96%, at least 97%, at least 98%, at least 99% or 100% identity to SEQ ID NO:59; a CDR2 comprising an amino acid sequence having at least 80%, at least 85%, at least 90%, at least 91%, at least 92%, at least 93%, at least 94%, at least 95%, at least 96%, at least 97%, at least 98%, at least 99% or 100% identity to SEQ ID NO:60; and a CDR3 comprising an amino acid sequence having at least 80%, at least 85%, at least 90%, at least 91%, at least 92%, at least 93%, at least 94%, at least 95%, at least 96%, at least 97%, at least 98%, at least 99% or 100% identity to SEQ ID NO:61; (ii) VH1 comprises a CDR1 comprising an amino acid sequence having at least 80%, at least 85%, at least 90%, at least 91%, at least 92%, at least 93%, at least 94%, at least 95%, at least 96%, at least 97%, at least 98%, at least 99% or 100% identity to SEQ ID NO:288; a CDR2 comprising an amino acid sequence having at least 80%, at least 85%, at least 90%, at least 91%, at least 92%, at least 93%, at least 94%, at least 95%, at least 96%, at least 97%, at least 98%, at least 99% or 100% identity to SEQ ID NO:289; and a CDR3 comprising an amino acid sequence having at least 80%, at least 85%, at least 90%, at least 91%, at least 92%, at least 93%, at least 94%, at least 95%, at least 96%, at least 97%, at least 98%, at least 99% or 100% identity to SEQ ID NO:290; (iii) VH3 comprises a CDR1 comprising an amino acid sequence having at least 80%, at least 85%, at least 90%, at least 91%, at least 92%, at least 93%, at least 94%, at least 95%, at least 96%, at least 97%, at least 98%, at least 99% or 100% identity to SEQ ID NO:280; a CDR2 comprising an amino acid sequence having at least 80%, at least 85%, at least 90%, at least 91%, at least 92%, at least 93%, at least 94%, at least 95%, at least 96%, at least 97%, at least 98%, at least 99% or 100% identity to SEQ ID NO:281; and a CDR3 comprising an amino acid sequence having at least 80%, at least 85%, at least 90%, at least 91%, at least 92%, at least 93%, at least 94%, at least 95%, at least 96%, at least 97%, at least 98%, at least 99% or 100% identity to SEQ ID NO:282; (iv) VL2 and VL4 comprise a CDR1 comprising an amino acid sequence having at least 80%, at least 85%, at least 90%, at least 91%, at least 92%, at least 93%, at least 94%, at least 95%, at least 96%, at least 97%, at least 98%, at least 99% or 100% identity to SEQ ID NO:55; a CDR2 comprising an amino acid sequence having at least 80%, at least 85%, at least 90%, at least 91%, at least 92%, at least 93%, at least 94%, at least 95%, at least 96%, at least 97%, at least 98%, at least 99% or 100% identity to SEQ ID NO:56 (having the sequence of GTN); and a CDR3 comprising an amino acid sequence having at least 80%, at least 85%, at least 90%, at least 91%, at least 92%, at least 93%, at least 94%, at least 95%, at least 96%, at least 97%, at least 98%, at least 99% or 100% identity to SEQ ID NO:57; (v) VL1 comprises a CDR1 comprising an amino acid sequence having at least 80%, at least 85%, at least 90%, at least 91%, at least 92%, at least 93%, at least 94%, at least 95%, at least 96%, at least 97%, at least 98%, at least 99% or 100% identity to SEQ ID NO:284; a CDR2 comprising an amino acid sequence having at least 80%, at least 85%, at least 90%, at least 91%, at least 92%, at least 93%, at least 94%, at least 95%, at least 96%, at least 97%, at least 98%, at least 99% or 100% identity to SEQ ID NO:285; and a CDR3 comprising an amino acid sequence having at least 80%, at least 85%, at least 90%, at least 91%, at least 92%, at least 93%, at least 94%, at least 95%, at least 96%, at least 97%, at least 98%, at least 99% or 100% identity to SEQ ID NO:286; and (vi) VL3 comprises a CDR1 comprising an amino acid sequence having at least 80%, at least 85%, at least 90%, at least 91%, at least 92%, at least 93%, at least 94%, at least 95%, at least 96%, at least 97%, at least 98%, at least 99% or 100% identity to SEQ ID NO:276; a CDR2 comprising an amino acid sequence having at least 80%, at least 85%, at least 90%, at least 91%, at least 92%, at least 93%, at least 94%, at least 95%, at least 96%, at least 97%, at least 98%, at least 99% or 100% identity to SEQ ID NO:277 (having the sequence of LGS); and a CDR3 comprising an amino acid sequence having at least 80%, at least 85%, at least 90%, at least 91%, at least 92%, at least 93%, at least 94%, at least 95%, at least 96%, at least 97%, at least 98%, at least 99% or 100% identity to SEQ ID NO:278. In some aspects, (i) VH2 and VH4 comprise a CDR1 comprising the amino acid sequence of SEQ ID NO:59; a CDR2 comprising the amino acid sequence of SEQ ID NO:60; and a CDR3 comprising the amino acid sequence of SEQ ID NO:61; (ii) VH1 comprises a CDR1 comprising the amino acid sequence of SEQ ID NO:288; a CDR2 comprising the amino acid sequence of SEQ ID NO:289; and a CDR3 comprising the amino acid sequence of SEQ ID NO:290; (iii) VH3 comprises a CDR1 comprising the amino acid sequence of SEQ ID NO:280; a CDR2 comprising the amino acid sequence of SEQ ID NO:281; and a CDR3 comprising the amino acid sequence of SEQ ID NO:282; (iv) VL2 and VL4 comprise a CDR1 comprising the amino acid sequence of SEQ ID NO:55; a CDR2 comprising the amino acid sequence of SEQ ID NO:56 (having the sequence of GTN); and a CDR3 comprising the amino acid sequence of SEQ ID NO:57; (v) VL1 comprises a CDR1 comprising the amino acid sequence of SEQ ID NO:284; a CDR2 comprising the amino acid sequence of SEQ ID NO:285; and a CDR3 comprising the amino acid sequence of SEQ ID NO:286; and (vi) VL3 comprises a CDR1 comprising the amino acid sequence of SEQ ID NO:276; a CDR2 comprising the amino acid sequence of SEQ ID NO:277 (having the sequence of LGS); and a CDR3 comprising the amino acid sequence of SEQ ID NO:278. In some aspects, L1-L16 comprise the amino acid sequence of any one of SEQ ID NOs:1-34, wherein SEQ ID NO:1 has the amino acid sequence of G, SEQ ID NO:2 has the amino acid sequence of A, SEQ ID NO:3 has the amino acid sequence of GSS and SEQ ID NO:4 has the amino acid sequence of ASG. In some aspects, L1 or L4 and L7 or L10 comprise the amino acid sequence of SEQ ID NO:6; L2 or L5 and L8 or L11 comprise the amino acid sequence of SEQ ID NO:27; and L3 or L6 and L9 or L12 comprise the amino acid sequence of SEQ ID NO:6. In some aspects, L1 or L5 and L9 or L13 comprise the amino acid sequence of SEQ ID NO:6; L2 or L6 and L10 or L14 comprise the amino acid sequence of SEQ ID NO:27; L3 or L7 and L11 or L15 comprise the amino acid sequence of SEQ ID NO:6; and L4 or L8 and L12 or L16 comprise the amino acid sequence of SEQ ID NO:12. In some aspects, Fc comprises a knob-into-hole modification or Fc effector function knockout mutation. In some aspects, Fc comprises an amino acid sequence having at least 80%, at least 85%, at least 90%, at least 91%, at least 92%, at least 93%, at least 94%, at least 95%, at least 96%, at least 97%, at least 98%, at least 99%, or 100% identity to SEQ ID NO:293 or 294. In some aspects, Fc comprises the amino acid sequence of SEQ ID NO:293 or 294. In some preferred aspects, CDR1, CDR2 and CDR3 of each of VH1, VH2, VH3, VH4, VL1, VL2, VL3 and VL4 have at least 90% identity with the corresponding amino acid sequences specified above, optionally with (i) an Fc having at least 90% identity with the corresponding amino acid sequence recited above; and/or (ii) one or more linker sequence as specified above. In some particularly preferred aspects, CDR1, CDR2 and CDR3 of each of VH1, VH2, VH3, VH4, VL1, VL2, VL3 and VL4 comprise or consist of the corresponding amino acid sequences specified above, optionally with (i) an Fc comprising or consisting of the corresponding amino acid sequence recited above; and/or (ii) one or more linker sequence as specified above.

[0684] In some aspects, (i) VH1 comprises a CDR1 comprising an amino acid sequence having at least 80%, at least 85%, at least 90%, at least 91%, at least 92%, at least 93%, at least 94%, at least 95%, at least 96%, at least 97%, at least 98%, at least 99% or 100% identity to SEQ ID NO:288; a CDR2 comprising an amino acid sequence having at least 80%, at least 85%, at least 90%, at least 91%, at least 92%, at least 93%, at least 94%, at least 95%, at least 96%, at least 97%, at least 98%, at least 99% or 100% identity to SEQ ID NO:289; and a CDR3 comprising an amino acid sequence having at least 80%, at least 85%, at least 90%, at least 91%, at least 92%, at least 93%, at least 94%, at least 95%, at least 96%, at least 97%, at least 98%, at least 99% or 100% identity to SEQ ID NO:290; (ii) VH2 and VH3 comprise a CDR1 comprising an amino acid sequence having at least 80%, at least 85%, at least 90%, at least 91%, at least 92%, at least 93%, at least 94%, at least 95%, at least 96%, at least 97%, at least 98%, at least 99% or 100% identity to SEQ ID NO:280; a CDR2 comprising an amino acid sequence having at least 80%, at least 85%, at least 90%, at least 91%, at least 92%, at least 93%, at least 94%, at least 95%, at least 96%, at least 97%, at least 98%, at least 99% or 100% identity to SEQ ID NO:281; and a CDR3 comprising an amino acid sequence having at least 80%, at least 85%, at least 90%, at least 91%, at least 92%, at least 93%, at least 94%, at least 95%, at least 96%, at least 97%, at least 98%, at least 99% or 100% identity to SEQ ID NO:282; (iii) VH4 comprises a CDR1 comprising an amino acid sequence having at least 80%, at least 85%, at least 90%, at least 91%, at least 92%, at least 93%, at least 94%, at least 95%, at least 96%, at least 97%, at least 98%, at least 99% or 100% identity to SEQ ID NO:59; a CDR2 comprising an amino acid sequence having at least 80%, at least 85%, at least 90%, at least 91%, at least 92%, at least 93%, at least 94%, at least 95%, at least 96%, at least 97%, at least 98%, at least 99% or 100% identity to SEQ ID NO:60; and a CDR3 comprising an amino acid sequence having at least 80%, at least 85%, at least 90%, at least 91%, at least 92%, at least 93%, at least 94%, at least 95%, at least 96%, at least 97%, at least 98%, at least 99% or 100% identity to SEQ ID NO:61; (iv) VL1 comprises a CDR1 comprising an amino acid sequence having at least 80%, at least 85%, at least 90%, at least 91%, at least 92%, at least 93%, at least 94%, at least 95%, at least 96%, at least 97%, at least 98%, at least 99% or 100% identity to SEQ ID NO:284; a CDR2 comprising an amino acid sequence having at least 80%, at least 85%, at least 90%, at least 91%, at least 92%, at least 93%, at least 94%, at least 95%, at least 96%, at least 97%, at least 98%, at least 99% or 100% identity to SEQ ID NO:285; and a CDR3 comprising an amino acid sequence having at least 80%, at least 85%, at least 90%, at least 91%, at least 92%, at least 93%, at least 94%, at least 95%, at least 96%, at least 97%, at least 98%, at least 99% or 100% identity to SEQ ID NO:286; (v) VL2 and VL3 comprise a CDR1 comprising an amino acid sequence having at least 80%, at least 85%, at least 90%, at least 91%, at least 92%, at least 93%, at least 94%, at least 95%, at least 96%, at least 97%, at least 98%, at least 99% or 100% identity to SEQ ID NO:276; a CDR2 comprising an amino acid sequence having at least 80%, at least 85%, at least 90%, at least 91%, at least 92%, at least 93%, at least 94%, at least 95%, at least 96%, at least 97%, at least 98%, at least 99% or 100% identity to SEQ ID NO:277 (having the sequence of LGS); and a CDR3 comprising an amino acid sequence having at least 80%, at least 85%, at least 90%, at least 91%, at least 92%, at least 93%, at least 94%, at least 95%, at least 96%, at least 97%, at least 98%, at least 99% or 100% identity to SEQ ID NO:278; and (vi) VL4 comprises a CDR1 comprising an amino acid sequence having at least 80%, at least 85%, at least 90%, at least 91%, at least 92%, at least 93%, at least 94%, at least 95%, at least 96%, at least 97%, at least 98%, at least 99% or 100% identity to SEQ ID NO:55; a CDR2 comprising an amino acid sequence having at least 80%, at least 85%, at least 90%, at least 91%, at least 92%, at least 93%, at least 94%, at least 95%, at least 96%, at least 97%, at least 98%, at least 99% or 100% identity to SEQ ID NO:56 (having the sequence of GTN); and a CDR3 comprising an amino acid sequence having at least 80%, at least 85%, at least 90%, at least 91%, at least 92%, at least 93%, at least 94%, at least 95%, at least 96%, at least 97%, at least 98%, at least 99% or 100% identity to SEQ ID NO:57. In some aspects, (i) VH1 comprises a CDR1 comprising the amino acid sequence of SEQ ID NO:288; a CDR2 comprising the amino acid sequence of SEQ ID NO:289; and a CDR3 comprising the amino acid sequence of SEQ ID NO:290; (ii) VH2 and VH3 comprise a CDR1 comprising the amino acid sequence of SEQ ID NO:280; a CDR2 comprising the amino acid sequence of SEQ ID NO:281; and a CDR3 comprising the amino acid sequence of SEQ ID NO:282; (iii) VH4 comprises a CDR1 comprising the amino acid sequence of SEQ ID NO:59; a CDR2 comprising the amino acid sequence of SEQ ID NO:60; and a CDR3 comprising the amino acid sequence of SEQ ID NO:61; (iv) VL1 comprises a CDR1 comprising the amino acid sequence of SEQ ID NO:284; a CDR2 comprising the amino acid sequence of SEQ ID NO:285; and a CDR3 comprising the amino acid sequence of SEQ ID NO:286; (v) VL2 and VL3 comprise a CDR1 comprising the amino acid sequence of SEQ ID NO:276; a CDR2 comprising the amino acid sequence of SEQ ID NO:277 (having the sequence of LGS); and a CDR3 comprising the amino acid sequence of SEQ ID NO:278; and (vi) VL4 comprises a CDR1 comprising the amino acid sequence of SEQ ID NO:55; a CDR2 comprising the amino acid sequence of SEQ ID NO:56 (having the sequence of GTN); and a CDR3 comprising the amino acid sequence of SEQ ID NO:57. In some aspects, L1-L16 comprise the amino acid sequence of any one of SEQ ID NOs:1-34, wherein SEQ ID NO:1 has the amino acid sequence of G, SEQ ID NO:2 has the amino acid sequence of A, SEQ ID NO:3 has the amino acid sequence of GSS and SEQ ID NO:4 has the amino acid sequence of ASG. In some aspects, L1 or L4 and L7 or L10 comprise the amino acid sequence of SEQ ID NO:6; L2 or L5 and L8 or L11 comprise the amino acid sequence of SEQ ID NO:27; and L3 or L6 and L9 or L12 comprise the amino acid sequence of SEQ ID NO:6. In some aspects, L1 or L5 and L9 or L13 comprise the amino acid sequence of SEQ ID NO:6; L2 or L6 and L10 or L14 comprise the amino acid sequence of SEQ ID NO:27; L3 or L7 and L11 or L15 comprise the amino acid sequence of SEQ ID NO:6; and L4 or L8 and L12 or L16 comprise the amino acid sequence of SEQ ID NO:12. In some aspects, Fc comprises a knob-into-hole modification or Fc effector function knockout mutation. In some aspects, Fc comprises an amino acid sequence having at least 80%, at least 85%, at least 90%, at least 91%, at least 92%, at least 93%, at least 94%, at least 95%, at least 96%, at least 97%, at least 98%, at least 99%, or 100% identity to SEQ ID NO:293 or 294. In some aspects, Fc comprises the amino acid sequence of SEQ ID NO:293 or 294. In some preferred aspects, CDR1, CDR2 and CDR3 of each of VH1, VH2, VH3, VH4, VL1, VL2, VL3 and VL4 have at least 90% identity with the corresponding amino acid sequences specified above, optionally with (i) an Fc having at least 90% identity with the corresponding amino acid sequence recited above; and/or (ii) one or more linker sequence as specified above. In some particularly preferred aspects, CDR1, CDR2 and CDR3 of each of VH1, VH2, VH3, VH4, VL1, VL2, VL3 and VL4 comprise or consist of the corresponding amino acid sequences specified above, optionally with (i) an Fc comprising or consisting of the corresponding amino acid sequence recited above; and/or (ii) one or more linker sequence as specified above.

[0685] In some aspects, (i) VH2 comprises a CDR1 comprising an amino acid sequence having at least 80%, at least 85%, at least 90%, at least 91%, at least 92%, at least 93%, at least 94%, at least 95%, at least 96%, at least 97%, at least 98%, at least 99% or 100% identity to SEQ ID NO:288; a CDR2 comprising an amino acid sequence having at least 80%, at least 85%, at least 90%, at least 91%, at least 92%, at least 93%, at least 94%, at least 95%, at least 96%, at least 97%, at least 98%, at least 99% or 100% identity to SEQ ID NO:289; and a CDR3 comprising an amino acid sequence having at least 80%, at least 85%, at least 90%, at least 91%, at least 92%, at least 93%, at least 94%, at least 95%, at least 96%, at least 97%, at least 98%, at least 99% or 100% identity to SEQ ID NO:290; (ii) VH1 and VH3 comprise a CDR1 comprising an amino acid sequence having at least 80%, at least 85%, at least 90%, at least 91%, at least 92%, at least 93%, at least 94%, at least 95%, at least 96%, at least 97%, at least 98%, at least 99% or 100% identity to SEQ ID NO:280; a CDR2 comprising an amino acid sequence having at least 80%, at least 85%, at least 90%, at least 91%, at least 92%, at least 93%, at least 94%, at least 95%, at least 96%, at least 97%, at least 98%, at least 99% or 100% identity to SEQ ID NO:281; and a CDR3 comprising an amino acid sequence having at least 80%, at least 85%, at least 90%, at least 91%, at least 92%, at least 93%, at least 94%, at least 95%, at least 96%, at least 97%, at least 98%, at least 99% or 100% identity to SEQ ID NO:282; (iii) VH4 comprises a CDR1 comprising an amino acid sequence having at least 80%, at least 85%, at least 90%, at least 91%, at least 92%, at least 93%, at least 94%, at least 95%, at least 96%, at least 97%, at least 98%, at least 99% or 100% identity to SEQ ID NO:59; a CDR2 comprising an amino acid sequence having at least 80%, at least 85%, at least 90%, at least 91%, at least 92%, at least 93%, at least 94%, at least 95%, at least 96%, at least 97%, at least 98%, at least 99% or 100% identity to SEQ ID NO:60; and a CDR3 comprising an amino acid sequence having at least 80%, at least 85%, at least 90%, at least 91%, at least 92%, at least 93%, at least 94%, at least 95%, at least 96%, at least 97%, at least 98%, at least 99% or 100% identity to SEQ ID NO:61; (iv) VL2 comprises a CDR1 comprising an amino acid sequence having at least 80%, at least 85%, at least 90%, at least 91%, at least 92%, at least 93%, at least 94%, at least 95%, at least 96%, at least 97%, at least 98%, at least 99% or 100% identity to SEQ ID NO:284; a CDR2 comprising an amino acid sequence having at least 80%, at least 85%, at least 90%, at least 91%, at least 92%, at least 93%, at least 94%, at least 95%, at least 96%, at least 97%, at least 98%, at least 99% or 100% identity to SEQ ID NO:285; and a CDR3 comprising an amino acid sequence having at least 80%, at least 85%, at least 90%, at least 91%, at least 92%, at least 93%, at least 94%, at least 95%, at least 96%, at least 97%, at least 98%, at least 99% or 100% identity to SEQ ID NO:286; (v) VL1 and VL3 comprise a CDR1 comprising an amino acid sequence having at least 80%, at least 85%, at least 90%, at least 91%, at least 92%, at least 93%, at least 94%, at least 95%, at least 96%, at least 97%, at least 98%, at least 99% or 100% identity to SEQ ID NO:276; a CDR2 comprising an amino acid sequence having at least 80%, at least 85%, at least 90%, at least 91%, at least 92%, at least 93%, at least 94%, at least 95%, at least 96%, at least 97%, at least 98%, at least 99% or 100% identity to SEQ ID NO:277 (having the sequence of LGS); and a CDR3 comprising an amino acid sequence having at least 80%, at least 85%, at least 90%, at least 91%, at least 92%, at least 93%, at least 94%, at least 95%, at least 96%, at least 97%, at least 98%, at least 99% or 100% identity to SEQ ID NO:278; and (vi) VL4 comprises a CDR1 comprising an amino acid sequence having at least 80%, at least 85%, at least 90%, at least 91%, at least 92%, at least 93%, at least 94%, at least 95%, at least 96%, at least 97%, at least 98%, at least 99% or 100% identity to SEQ ID NO:55; a CDR2 comprising an amino acid sequence having at least 80%, at least 85%, at least 90%, at least 91%, at least 92%, at least 93%, at least 94%, at least 95%, at least 96%, at least 97%, at least 98%, at least 99% or 100% identity to SEQ ID NO:56 (having the sequence of GTN); and a CDR3 comprising an amino acid sequence having at least 80%, at least 85%, at least 90%, at least 91%, at least 92%, at least 93%, at least 94%, at least 95%, at least 96%, at least 97%, at least 98%, at least 99% or 100% identity to SEQ ID NO:57. In some aspects, (i) VH2 comprises a CDR1 comprising the amino acid sequence of SEQ ID NO:288; a CDR2 comprising the amino acid sequence of SEQ ID NO:289; and a CDR3 comprising the amino acid sequence of SEQ ID NO:290; (ii) VH1 and VH3 comprise a CDR1 comprising the amino acid sequence of SEQ ID NO:280; a CDR2 comprising the amino acid sequence of SEQ ID NO:281; and a CDR3 comprising the amino acid sequence of SEQ ID NO:282; (iii) VH4 comprises a CDR1 comprising the amino acid sequence of SEQ ID NO:59; a CDR2 comprising the amino acid sequence of SEQ ID NO:60; and a CDR3 comprising the amino acid sequence of SEQ ID NO:61; (iv) VL2 comprises a CDR1 comprising the amino acid sequence of SEQ ID NO:284; a CDR2 comprising the amino acid sequence of SEQ ID NO:285; and a CDR3 comprising the amino acid sequence of SEQ ID NO:286; (v) VL1 and VL3 comprise a CDR1 comprising the amino acid sequence of SEQ ID NO:276; a CDR2 comprising the amino acid sequence of SEQ ID NO:277 (having the sequence of LGS); and a CDR3 comprising the amino acid sequence of SEQ ID NO:278; and (vi) VL4 comprises a CDR1 comprising the amino acid sequence of SEQ ID NO:55; a CDR2 comprising the amino acid sequence of SEQ ID NO:56 (having the sequence of GTN); and a CDR3 comprising the amino acid sequence of SEQ ID NO:57. In some aspects, L1-L16 comprise the amino acid sequence of any one of SEQ ID NOs:1-34, wherein SEQ ID NO:1 has the amino acid sequence of G, SEQ ID NO:2 has the amino acid sequence of A, SEQ ID NO:3 has the amino acid sequence of GSS and SEQ ID NO:4 has the amino acid sequence of ASG. In some aspects, L1 or L4 and L7 or L10 comprise the amino acid sequence of SEQ ID NO:6; L2 or L5 and L8 or L11 comprise the amino acid sequence of SEQ ID NO:27; and L3 or L6 and L9 or L12 comprise the amino acid sequence of SEQ ID NO:6. In some aspects, L1 or L5 and L9 or L13 comprise the amino acid sequence of SEQ ID NO:6; L2 or L6 and L10 or L14 comprise the amino acid sequence of SEQ ID NO:27; L3 or L7 and L11 or L15 comprise the amino acid sequence of SEQ ID NO:6; and L4 or L8 and L12 or L16 comprise the amino acid sequence of SEQ ID NO:12. In some aspects, Fc comprises a knob-into-hole modification or Fc effector function knockout mutation. In some aspects, Fc comprises an amino acid sequence having at least 80%, at least 85%, at least 90%, at least 91%, at least 92%, at least 93%, at least 94%, at least 95%, at least 96%, at least 97%, at least 98%, at least 99%, or 100% identity to SEQ ID NO:293 or 294. In some aspects, Fc comprises the amino acid sequence of SEQ ID NO:293 or 294. In some preferred aspects, CDR1, CDR2 and CDR3 of each of VH1, VH2, VH3, VH4, VL1, VL2, VL3 and VL4 have at least 90% identity with the corresponding amino acid sequences specified above, optionally with (i) an Fc having at least 90% identity with the corresponding amino acid sequence recited above; and/or (ii) one or more linker sequence as specified above. In some particularly preferred aspects, CDR1, CDR2 and CDR3 of each of VH1, VH2, VH3, VH4, VL1, VL2, VL3 and VL4 comprise or consist of the corresponding amino acid sequences specified above, optionally with (i) an Fc comprising or consisting of the corresponding amino acid sequence recited above; and/or (ii) one or more linker sequence as specified above.

[0686] In some aspects, (i) VH1 comprises a CDR1 comprising an amino acid sequence having at least 80%, at least 85%, at least 90%, at least 91%, at least 92%, at least 93%, at least 94%, at least 95%, at least 96%, at least 97%, at least 98%, at least 99% or 100% identity to SEQ ID NO:59; a CDR2 comprising an amino acid sequence having at least 80%, at least 85%, at least 90%, at least 91%, at least 92%, at least 93%, at least 94%, at least 95%, at least 96%, at least 97%, at least 98%, at least 99% or 100% identity to SEQ ID NO:60; and a CDR3 comprising an amino acid sequence having at least 80%, at least 85%, at least 90%, at least 91%, at least 92%, at least 93%, at least 94%, at least 95%, at least 96%, at least 97%, at least 98%, at least 99% or 100% identity to SEQ ID NO:61; (ii) VH2 and VH4 comprise a CDR1 comprising an amino acid sequence having at least 80%, at least 85%, at least 90%, at least 91%, at least 92%, at least 93%, at least 94%, at least 95%, at least 96%, at least 97%, at least 98%, at least 99% or 100% identity to SEQ ID NO:280; a CDR2 comprising an amino acid sequence having at least 80%, at least 85%, at least 90%, at least 91%, at least 92%, at least 93%, at least 94%, at least 95%, at least 96%, at least 97%, at least 98%, at least 99% or 100% identity to SEQ ID NO:281; and a CDR3 comprising an amino acid sequence having at least 80%, at least 85%, at least 90%, at least 91%, at least 92%, at least 93%, at least 94%, at least 95%, at least 96%, at least 97%, at least 98%, at least 99% or 100% identity to SEQ ID NO:282; (iii) VH3 comprises a CDR1 comprising an amino acid sequence having at least 80%, at least 85%, at least 90%, at least 91%, at least 92%, at least 93%, at least 94%, at least 95%, at least 96%, at least 97%, at least 98%, at least 99% or 100% identity to SEQ ID NO:288; a CDR2 comprising an amino acid sequence having at least 80%, at least 85%, at least 90%, at least 91%, at least 92%, at least 93%, at least 94%, at least 95%, at least 96%, at least 97%, at least 98%, at least 99% or 100% identity to SEQ ID NO:289; and a CDR3 comprising an amino acid sequence having at least 80%, at least 85%, at least 90%, at least 91%, at least 92%, at least 93%, at least 94%, at least 95%, at least 96%, at least 97%, at least 98%, at least 99% or 100% identity to SEQ ID NO:290; (iv) VL1 comprises a CDR1 comprising an amino acid sequence having at least 80%, at least 85%, at least 90%, at least 91%, at least 92%, at least 93%, at least 94%, at least 95%, at least 96%, at least 97%, at least 98%, at least 99% or 100% identity to SEQ ID NO:55; a CDR2 comprising an amino acid sequence having at least 80%, at least 85%, at least 90%, at least 91%, at least 92%, at least 93%, at least 94%, at least 95%, at least 96%, at least 97%, at least 98%, at least 99% or 100% identity to SEQ ID NO:56 (having the sequence of GTN); and a CDR3 comprising an amino acid sequence having at least 80%, at least 85%, at least 90%, at least 91%, at least 92%, at least 93%, at least 94%, at least 95%, at least 96%, at least 97%, at least 98%, at least 99% or 100% identity to SEQ ID NO:57; (v) VL2 and VL4 comprise a CDR1 comprising an amino acid sequence having at least 80%, at least 85%, at least 90%, at least 91%, at least 92%, at least 93%, at least 94%, at least 95%, at least 96%, at least 97%, at least 98%, at least 99% or 100% identity to SEQ ID NO:276; a CDR2 comprising an amino acid sequence having at least 80%, at least 85%, at least 90%, at least 91%, at least 92%, at least 93%, at least 94%, at least 95%, at least 96%, at least 97%, at least 98%, at least 99% or 100% identity to SEQ ID NO:277 (having the sequence of LGS); and a CDR3 comprising an amino acid sequence having at least 80%, at least 85%, at least 90%, at least 91%, at least 92%, at least 93%, at least 94%, at least 95%, at least 96%, at least 97%, at least 98%, at least 99% or 100% identity to SEQ ID NO:278; and (vi) VL3 comprises a CDR1 comprising an amino acid sequence having at least 80%, at least 85%, at least 90%, at least 91%, at least 92%, at least 93%, at least 94%, at least 95%, at least 96%, at least 97%, at least 98%, at least 99% or 100% identity to SEQ ID NO:284; a CDR2 comprising an amino acid sequence having at least 80%, at least 85%, at least 90%, at least 91%, at least 92%, at least 93%, at least 94%, at least 95%, at least 96%, at least 97%, at least 98%, at least 99% or 100% identity to SEQ ID NO:285; and a CDR3 comprising an amino acid sequence having at least 80%, at least 85%, at least 90%, at least 91%, at least 92%, at least 93%, at least 94%, at least 95%, at least 96%, at least 97%, at least 98%, at least 99% or 100% identity to SEQ ID NO:286. In some aspects, (i) VH1 comprises a CDR1 comprising the amino acid sequence of SEQ ID NO:59; a CDR2 comprising the amino acid sequence of SEQ ID NO:60; and a CDR3 comprising the amino acid sequence of SEQ ID NO:61; (ii) VH2 and VH4 comprise a CDR1 comprising the amino acid sequence of SEQ ID NO:280; a CDR2 comprising the amino acid sequence of SEQ ID NO:281; and a CDR3 comprising the amino acid sequence of SEQ ID NO:282; (iii) VH3 comprises a CDR1 comprising the amino acid sequence of SEQ ID NO:288; a CDR2 comprising the amino acid sequence of SEQ ID NO:289; and a CDR3 comprising the amino acid sequence of SEQ ID NO:290; (iv) VL1 comprises a CDR1 comprising the amino acid sequence of SEQ ID NO:55; a CDR2 comprising the amino acid sequence of SEQ ID NO:56 (having the sequence of GTN); and a CDR3 comprising the amino acid sequence of SEQ ID NO:57; (v) VL2 and VL4 comprise a CDR1 comprising the amino acid sequence of SEQ ID NO:276; a CDR2 comprising the amino acid sequence of SEQ ID NO:277 (having the sequence of LGS); and a CDR3 comprising the amino acid sequence of SEQ ID NO:278; and (vi) VL3 comprises a CDR1 comprising the amino acid sequence of SEQ ID NO:284; a CDR2 comprising the amino acid sequence of SEQ ID NO:285; and a CDR3 comprising the amino acid sequence of SEQ ID NO:286. In some aspects, L1-L16 comprise the amino acid sequence of any one of SEQ ID NOs:1-34, wherein SEQ ID NO:1 has the amino acid sequence of G, SEQ ID NO:2 has the amino acid sequence of A, SEQ ID NO:3 has the amino acid sequence of GSS and SEQ ID NO:4 has the amino acid sequence of ASG. In some aspects, L1 or L4 and L7 or L10 comprise the amino acid sequence of SEQ ID NO:6; L2 or L5 and L8 or L11 comprise the amino acid sequence of SEQ ID NO:27; and L3 or L6 and L9 or L12 comprise the amino acid sequence of SEQ ID NO:6. In some aspects, L1 or L5 and L9 or L13 comprise the amino acid sequence of SEQ ID NO:6; L2 or L6 and L10 or L14 comprise the amino acid sequence of SEQ ID NO:27; L3 or L7 and L11 or L15 comprise the amino acid sequence of SEQ ID NO:6; and L4 or L8 and L12 or L16 comprise the amino acid sequence of SEQ ID NO:12. In some aspects, Fc comprises a knob-into-hole modification or Fc effector function knockout mutation. In some aspects, Fc comprises an amino acid sequence having at least 80%, at least 85%, at least 90%, at least 91%, at least 92%, at least 93%, at least 94%, at least 95%, at least 96%, at least 97%, at least 98%, at least 99%, or 100% identity to SEQ ID NO:293 or 294. In some aspects, Fc comprises the amino acid sequence of SEQ ID NO:293 or 294. In some preferred aspects, CDR1, CDR2 and CDR3 of each of VH1, VH2, VH3, VH4, VL1, VL2, VL3 and VL4 have at least 90% identity with the corresponding amino acid sequences specified above, optionally with (i) an Fc having at least 90% identity with the corresponding amino acid sequence recited above; and/or (ii) one or more linker sequence as specified above. In some particularly preferred aspects, CDR1, CDR2 and CDR3 of each of VH1, VH2, VH3, VH4, VL1, VL2, VL3 and VL4 comprise or consist of the corresponding amino acid sequences specified above, optionally with (i) an Fc comprising or consisting of the corresponding amino acid sequence recited above; and/or (ii) one or more linker sequence as specified above.

[0687] In some aspects, (i) VH1 comprises a CDR1 comprising an amino acid sequence having at least 80%, at least 85%, at least 90%, at least 91%, at least 92%, at least 93%, at least 94%, at least 95%, at least 96%, at least 97%, at least 98%, at least 99% or 100% identity to SEQ ID NO:59; a CDR2 comprising an amino acid sequence having at least 80%, at least 85%, at least 90%, at least 91%, at least 92%, at least 93%, at least 94%, at least 95%, at least 96%, at least 97%, at least 98%, at least 99% or 100% identity to SEQ ID NO:60; and a CDR3 comprising an amino acid sequence having at least 80%, at least 85%, at least 90%, at least 91%, at least 92%, at least 93%, at least 94%, at least 95%, at least 96%, at least 97%, at least 98%, at least 99% or 100% identity to SEQ ID NO:61; (ii) VH2 and VH3 comprise a CDR1 comprising an amino acid sequence having at least 80%, at least 85%, at least 90%, at least 91%, at least 92%, at least 93%, at least 94%, at least 95%, at least 96%, at least 97%, at least 98%, at least 99% or 100% identity to SEQ ID NO:280; a CDR2 comprising an amino acid sequence having at least 80%, at least 85%, at least 90%, at least 91%, at least 92%, at least 93%, at least 94%, at least 95%, at least 96%, at least 97%, at least 98%, at least 99% or 100% identity to SEQ ID NO:281; and a CDR3 comprising an amino acid sequence having at least 80%, at least 85%, at least 90%, at least 91%, at least 92%, at least 93%, at least 94%, at least 95%, at least 96%, at least 97%, at least 98%, at least 99% or 100% identity to SEQ ID NO:282; (iii) VH4 comprises a CDR1 comprising an amino acid sequence having at least 80%, at least 85%, at least 90%, at least 91%, at least 92%, at least 93%, at least 94%, at least 95%, at least 96%, at least 97%, at least 98%, at least 99% or 100% identity to SEQ ID NO:288; a CDR2 comprising an amino acid sequence having at least 80%, at least 85%, at least 90%, at least 91%, at least 92%, at least 93%, at least 94%, at least 95%, at least 96%, at least 97%, at least 98%, at least 99% or 100% identity to SEQ ID NO:289; and a CDR3 comprising an amino acid sequence having at least 80%, at least 85%, at least 90%, at least 91%, at least 92%, at least 93%, at least 94%, at least 95%, at least 96%, at least 97%, at least 98%, at least 99% or 100% identity to SEQ ID NO:290; (iv) VL1 comprises a CDR1 comprising an amino acid sequence having at least 80%, at least 85%, at least 90%, at least 91%, at least 92%, at least 93%, at least 94%, at least 95%, at least 96%, at least 97%, at least 98%, at least 99% or 100% identity to SEQ ID NO:55; a CDR2 comprising an amino acid sequence having at least 80%, at least 85%, at least 90%, at least 91%, at least 92%, at least 93%, at least 94%, at least 95%, at least 96%, at least 97%, at least 98%, at least 99% or 100% identity to SEQ ID NO:56 (having the sequence of GTN); and a CDR3 comprising an amino acid sequence having at least 80%, at least 85%, at least 90%, at least 91%, at least 92%, at least 93%, at least 94%, at least 95%, at least 96%, at least 97%, at least 98%, at least 99% or 100% identity to SEQ ID NO:57; (v) VL2 and VL3 comprise a CDR1 comprising an amino acid sequence having at least 80%, at least 85%, at least 90%, at least 91%, at least 92%, at least 93%, at least 94%, at least 95%, at least 96%, at least 97%, at least 98%, at least 99% or 100% identity to SEQ ID NO:276; a CDR2 comprising an amino acid sequence having at least 80%, at least 85%, at least 90%, at least 91%, at least 92%, at least 93%, at least 94%, at least 95%, at least 96%, at least 97%, at least 98%, at least 99% or 100% identity to SEQ ID NO:277 (having the sequence of LGS); and a CDR3 comprising an amino acid sequence having at least 80%, at least 85%, at least 90%, at least 91%, at least 92%, at least 93%, at least 94%, at least 95%, at least 96%, at least 97%, at least 98%, at least 99% or 100% identity to SEQ ID NO:278; and (vi) VL4 comprises a CDR1 comprising an amino acid sequence having at least 80%, at least 85%, at least 90%, at least 91%, at least 92%, at least 93%, at least 94%, at least 95%, at least 96%, at least 97%, at least 98%, at least 99% or 100% identity to SEQ ID NO:284; a CDR2 comprising an amino acid sequence having at least 80%, at least 85%, at least 90%, at least 91%, at least 92%, at least 93%, at least 94%, at least 95%, at least 96%, at least 97%, at least 98%, at least 99% or 100% identity to SEQ ID NO:285; and a CDR3 comprising an amino acid sequence having at least 80%, at least 85%, at least 90%, at least 91%, at least 92%, at least 93%, at least 94%, at least 95%, at least 96%, at least 97%, at least 98%, at least 99% or 100% identity to SEQ ID NO:286. In some aspects, (i) VH1 comprises a CDR1 comprising the amino acid sequence of SEQ ID NO:59; a CDR2 comprising the amino acid sequence of SEQ ID NO:60; and a CDR3 comprising the amino acid sequence of SEQ ID NO:61; (ii) VH2 and VH3 comprise a CDR1 comprising the amino acid sequence of SEQ ID NO:280; a CDR2 comprising the amino acid sequence of SEQ ID NO:281; and a CDR3 comprising the amino acid sequence of SEQ ID NO:282; (iii) VH4 comprises a CDR1 comprising the amino acid sequence of SEQ ID NO:288; a CDR2 comprising the amino acid sequence of SEQ ID NO:289; and a CDR3 comprising the amino acid sequence of SEQ ID NO:290; (iv) VL1 comprises a CDR1 comprising the amino acid sequence of SEQ ID NO:55; a CDR2 comprising the amino acid sequence of SEQ ID NO:56 (having the sequence of GTN); and a CDR3 comprising the amino acid sequence of SEQ ID NO:57; (v) VL2 and VL3 comprise a CDR1 comprising the amino acid sequence of SEQ ID NO:276; a CDR2 comprising the amino acid sequence of SEQ ID NO:277 (having the sequence of LGS); and a CDR3 comprising the amino acid sequence of SEQ ID NO:278; and (vi) VL4 comprises a CDR1 comprising the amino acid sequence of SEQ ID NO:284; a CDR2 comprising the amino acid sequence of SEQ ID NO:285; and a CDR3 comprising the amino acid sequence of SEQ ID NO:286. In some aspects, L1-L16 comprise the amino acid sequence of any one of SEQ ID NOs:1-34, wherein SEQ ID NO:1 has the amino acid sequence of G, SEQ ID NO:2 has the amino acid sequence of A, SEQ ID NO:3 has the amino acid sequence of GSS and SEQ ID NO:4 has the amino acid sequence of ASG. In some aspects, L1 or L4 and L7 or L10 comprise the amino acid sequence of SEQ ID NO:6; L2 or L5 and L8 or L11 comprise the amino acid sequence of SEQ ID NO:27; and L3 or L6 and L9 or L12 comprise the amino acid sequence of SEQ ID NO:6. In some aspects, L1 or L5 and L9 or L13 comprise the amino acid sequence of SEQ ID NO:6; L2 or L6 and L10 or L14 comprise the amino acid sequence of SEQ ID NO:27; L3 or L7 and L11 or L15 comprise the amino acid sequence of SEQ ID NO:6; and L4 or L8 and L12 or L16 comprise the amino acid sequence of SEQ ID NO:12. In some aspects, Fc comprises a knob-into-hole modification or Fc effector function knockout mutation. In some aspects, Fc comprises an amino acid sequence having at least 80%, at least 85%, at least 90%, at least 91%, at least 92%, at least 93%, at least 94%, at least 95%, at least 96%, at least 97%, at least 98%, at least 99%, or 100% identity to SEQ ID NO:293 or 294. In some aspects, Fc comprises the amino acid sequence of SEQ ID NO:293 or 294. In some preferred aspects, CDR1, CDR2 and CDR3 of each of VH1, VH2, VH3, VH4, VL1, VL2, VL3 and VL4 have at least 90% identity with the corresponding amino acid sequences specified above, optionally with (i) an Fc having at least 90% identity with the corresponding amino acid sequence recited above; and/or (ii) one or more linker sequence as specified above. In some particularly preferred aspects, CDR1, CDR2 and CDR3 of each of VH1, VH2, VH3, VH4, VL1, VL2, VL3 and VL4 comprise or consist of the corresponding amino acid sequences specified above, optionally with (i) an Fc comprising or consisting of the corresponding amino acid sequence recited above; and/or (ii) one or more linker sequence as specified above.

[0688] In some aspects, (i) VH1 comprises a CDR1 comprising an amino acid sequence having at least 80%, at least 85%, at least 90%, at least 91%, at least 92%, at least 93%, at least 94%, at least 95%, at least 96%, at least 97%, at least 98%, at least 99% or 100% identity to SEQ ID NO:59; a CDR2 comprising an amino acid sequence having at least 80%, at least 85%, at least 90%, at least 91%, at least 92%, at least 93%, at least 94%, at least 95%, at least 96%, at least 97%, at least 98%, at least 99% or 100% identity to SEQ ID NO:60; and a CDR3 comprising an amino acid sequence having at least 80%, at least 85%, at least 90%, at least 91%, at least 92%, at least 93%, at least 94%, at least 95%, at least 96%, at least 97%, at least 98%, at least 99% or 100% identity to SEQ ID NO:61; (ii) VH2 comprises a CDR1 comprising an amino acid sequence having at least 80%, at least 85%, at least 90%, at least 91%, at least 92%, at least 93%, at least 94%, at least 95%, at least 96%, at least 97%, at least 98%, at least 99% or 100% identity to SEQ ID NO:272; a CDR2 comprising an amino acid sequence having at least 80%, at least 85%, at least 90%, at least 91%, at least 92%, at least 93%, at least 94%, at least 95%, at least 96%, at least 97%, at least 98%, at least 99% or 100% identity to SEQ ID NO:273; and a CDR3 comprising an amino acid sequence having at least 80%, at least 85%, at least 90%, at least 91%, at least 92%, at least 93%, at least 94%, at least 95%, at least 96%, at least 97%, at least 98%, at least 99% or 100% identity to SEQ ID NO:274; (iii) VH3 comprises a CDR1 comprising an amino acid sequence having at least 80%, at least 85%, at least 90%, at least 91%, at least 92%, at least 93%, at least 94%, at least 95%, at least 96%, at least 97%, at least 98%, at least 99% or 100% identity to SEQ ID NO:264; a CDR2 comprising an amino acid sequence having at least 80%, at least 85%, at least 90%, at least 91%, at least 92%, at least 93%, at least 94%, at least 95%, at least 96%, at least 97%, at least 98%, at least 99% or 100% identity to SEQ ID NO:265; and a CDR3 comprising an amino acid sequence having at least 80%, at least 85%, at least 90%, at least 91%, at least 92%, at least 93%, at least 94%, at least 95%, at least 96%, at least 97%, at least 98%, at least 99% or 100% identity to SEQ ID NO:266; (iv) VH4 comprises a CDR1 comprising an amino acid sequence having at least 80%, at least 85%, at least 90%, at least 91%, at least 92%, at least 93%, at least 94%, at least 95%, at least 96%, at least 97%, at least 98%, at least 99% or 100% identity to SEQ ID NO:280; a CDR2 comprising an amino acid sequence having at least 80%, at least 85%, at least 90%, at least 91%, at least 92%, at least 93%, at least 94%, at least 95%, at least 96%, at least 97%, at least 98%, at least 99% or 100% identity to SEQ ID NO:281; and a CDR3 comprising an amino acid sequence having at least 80%, at least 85%, at least 90%, at least 91%, at least 92%, at least 93%, at least 94%, at least 95%, at least 96%, at least 97%, at least 98%, at least 99% or 100% identity to SEQ ID NO:282; (v) VL1 comprises a CDR1 comprising an amino acid sequence having at least 80%, at least 85%, at least 90%, at least 91%, at least 92%, at least 93%, at least 94%, at least 95%, at least 96%, at least 97%, at least 98%, at least 99% or 100% identity to SEQ ID NO:55; a CDR2 comprising an amino acid sequence having at least 80%, at least 85%, at least 90%, at least 91%, at least 92%, at least 93%, at least 94%, at least 95%, at least 96%, at least 97%, at least 98%, at least 99% or 100% identity to SEQ ID NO:56 (having the sequence of GTN); and a CDR3 comprising an amino acid sequence having at least 80%, at least 85%, at least 90%, at least 91%, at least 92%, at least 93%, at least 94%, at least 95%, at least 96%, at least 97%, at least 98%, at least 99% or 100% identity to SEQ ID NO:57; (vi) VL2 comprises a CDR1 comprising an amino acid sequence having at least 80%, at least 85%, at least 90%, at least 91%, at least 92%, at least 93%, at least 94%, at least 95%, at least 96%, at least 97%, at least 98%, at least 99% or 100% identity to SEQ ID NO:268; a CDR2 comprising an amino acid sequence having at least 80%, at least 85%, at least 90%, at least 91%, at least 92%, at least 93%, at least 94%, at least 95%, at least 96%, at least 97%, at least 98%, at least 99% or 100% identity to SEQ ID NO:269 (having the sequence of GAS); and a CDR3 comprising an amino acid sequence having at least 80%, at least 85%, at least 90%, at least 91%, at least 92%, at least 93%, at least 94%, at least 95%, at least 96%, at least 97%, at least 98%, at least 99% or 100% identity to SEQ ID NO:270; (vii) VL3 comprises a CDR1 comprising an amino acid sequence having at least 80%, at least 85%, at least 90%, at least 91%, at least 92%, at least 93%, at least 94%, at least 95%, at least 96%, at least 97%, at least 98%, at least 99% or 100% identity to SEQ ID NO:260; a CDR2 comprising an amino acid sequence having at least 80%, at least 85%, at least 90%, at least 91%, at least 92%, at least 93%, at least 94%, at least 95%, at least 96%, at least 97%, at least 98%, at least 99% or 100% identity to SEQ ID NO:261; and a CDR3 comprising an amino acid sequence having at least 80%, at least 85%, at least 90%, at least 91%, at least 92%, at least 93%, at least 94%, at least 95%, at least 96%, at least 97%, at least 98%, at least 99% or 100% identity to SEQ ID NO:262; and (viii) VL4 comprises a CDR1 comprising an amino acid sequence having at least 80%, at least 85%, at least 90%, at least 91%, at least 92%, at least 93%, at least 94%, at least 95%, at least 96%, at least 97%, at least 98%, at least 99% or 100% identity to SEQ ID NO:276; a CDR2 comprising an amino acid sequence having at least 80%, at least 85%, at least 90%, at least 91%, at least 92%, at least 93%, at least 94%, at least 95%, at least 96%, at least 97%, at least 98%, at least 99% or 100% identity to SEQ ID NO:277 (having the sequence of LGS); and a CDR3 comprising an amino acid sequence having at least 80%, at least 85%, at least 90%, at least 91%, at least 92%, at least 93%, at least 94%, at least 95%, at least 96%, at least 97%, at least 98%, at least 99% or 100% identity to SEQ ID NO:278. In some aspects, (i) VH1 comprises a CDR1 comprising the amino acid sequence of SEQ ID NO:59; a CDR2 comprising the amino acid sequence of SEQ ID NO:60; and a CDR3 comprising the amino acid sequence of SEQ ID NO:61; (ii) VH2 comprises a CDR1 comprising the amino acid sequence of SEQ ID NO:272; a CDR2 comprising the amino acid sequence of SEQ ID NO:273; and a CDR3 comprising the amino acid sequence of SEQ ID NO:274; (iii) VH3 comprises a CDR1 comprising the amino acid sequence of SEQ ID NO:264; a CDR2 comprising the amino acid sequence of SEQ ID NO:265; and a CDR3 comprising the amino acid sequence of SEQ ID NO:266; (iv) VH4 comprises a CDR1 comprising the amino acid sequence of SEQ ID NO:280; a CDR2 comprising the amino acid sequence of SEQ ID NO:281; and a CDR3 comprising the amino acid sequence of SEQ ID NO:282; (v) VL1 comprises a CDR1 comprising the amino acid sequence of SEQ ID NO:55; a CDR2 comprising the amino acid sequence of SEQ ID NO:56 (having the sequence of GTN); and a CDR3 comprising the amino acid sequence of SEQ ID NO:57; (vi) VL2 comprises a CDR1 comprising the amino acid sequence of SEQ ID NO:268; a CDR2 comprising the amino acid sequence of SEQ ID NO:269 (having the sequence of GAS); and a CDR3 comprising the amino acid sequence of SEQ ID NO:270; (vii) VL3 comprises a CDR1 comprising the amino acid sequence of SEQ ID NO:260; a CDR2 comprising the amino acid sequence of SEQ ID NO:261; and a CDR3 comprising the amino acid sequence of SEQ ID NO:262; and (viii) VL4 comprises a CDR1 comprising the amino acid sequence of SEQ ID NO:276; a CDR2 comprising the amino acid sequence of SEQ ID NO:277 (having the sequence of LGS); and a CDR3 comprising the amino acid sequence of SEQ ID NO:278. In some aspects, L1-L16 comprise the amino acid sequence of any one of SEQ ID NOs:1-34, wherein SEQ ID NO:1 has the amino acid sequence of G, SEQ ID NO:2 has the amino acid sequence of A, SEQ ID NO:3 has the amino acid sequence of GSS and SEQ ID NO:4 has the amino acid sequence of ASG. In some aspects, L1 or L4 and L7 or L10 comprise the amino acid sequence of SEQ ID NO:6; L2 or L5 and L8 or L11 comprise the amino acid sequence of SEQ ID NO:27; and L3 or L6 and L9 or L12 comprise the amino acid sequence of SEQ ID NO:6. In some aspects, L1 or L5 and L9 or L13 comprise the amino acid sequence of SEQ ID NO:6; L2 or L6 and L10 or L14 comprise the amino acid sequence of SEQ ID NO:27; L3 or L7 and L11 or L15 comprise the amino acid sequence of SEQ ID NO:6; and L4 or L8 and L12 or L16 comprise the amino acid sequence of SEQ ID NO:12. In some aspects, Fc comprises a knob-into-hole modification or Fc effector function knockout mutation. In some aspects, Fc comprises an amino acid sequence having at least 80%, at least 85%, at least 90%, at least 91%, at least 92%, at least 93%, at least 94%, at least 95%, at least 96%, at least 97%, at least 98%, at least 99%, or 100% identity to SEQ ID NO:293 or 294. In some aspects, Fc comprises the amino acid sequence of SEQ ID NO:293 or 294. In some preferred aspects, CDR1, CDR2 and CDR3 of each of VH1, VH2, VH3, VH4, VL1, VL2, VL3 and VL4 have at least 90% identity with the corresponding amino acid sequences specified above, optionally with (i) an Fc having at least 90% identity with the corresponding amino acid sequence recited above; and/or (ii) one or more linker sequence as specified above. In some particularly preferred aspects, CDR1, CDR2 and CDR3 of each of VH1, VH2, VH3, VH4, VL1, VL2, VL3 and VL4 comprise or consist of the corresponding amino acid sequences specified above, optionally with (i) an Fc comprising or consisting of the corresponding amino acid sequence recited above; and/or (ii) one or more linker sequence as specified above.

[0689] In some aspects, (i) VH1 comprises a CDR1 comprising an amino acid sequence having at least 80%, at least 85%, at least 90%, at least 91%, at least 92%, at least 93%, at least 94%, at least 95%, at least 96%, at least 97%, at least 98%, at least 99% or 100% identity to SEQ ID NO:59; a CDR2 comprising an amino acid sequence having at least 80%, at least 85%, at least 90%, at least 91%, at least 92%, at least 93%, at least 94%, at least 95%, at least 96%, at least 97%, at least 98%, at least 99% or 100% identity to SEQ ID NO:60; and a CDR3 comprising an amino acid sequence having at least 80%, at least 85%, at least 90%, at least 91%, at least 92%, at least 93%, at least 94%, at least 95%, at least 96%, at least 97%, at least 98%, at least 99% or 100% identity to SEQ ID NO:61; (ii) VH2 comprises a CDR1 comprising an amino acid sequence having at least 80%, at least 85%, at least 90%, at least 91%, at least 92%, at least 93%, at least 94%, at least 95%, at least 96%, at least 97%, at least 98%, at least 99% or 100% identity to SEQ ID NO:288; a CDR2 comprising an amino acid sequence having at least 80%, at least 85%, at least 90%, at least 91%, at least 92%, at least 93%, at least 94%, at least 95%, at least 96%, at least 97%, at least 98%, at least 99% or 100% identity to SEQ ID NO:289; and a CDR3 comprising an amino acid sequence having at least 80%, at least 85%, at least 90%, at least 91%, at least 92%, at least 93%, at least 94%, at least 95%, at least 96%, at least 97%, at least 98%, at least 99% or 100% identity to SEQ ID NO:290; (iii) VH3 comprises a CDR1 comprising an amino acid sequence having at least 80%, at least 85%, at least 90%, at least 91%, at least 92%, at least 93%, at least 94%, at least 95%, at least 96%, at least 97%, at least 98%, at least 99% or 100% identity to SEQ ID NO:280; a CDR2 comprising an amino acid sequence having at least 80%, at least 85%, at least 90%, at least 91%, at least 92%, at least 93%, at least 94%, at least 95%, at least 96%, at least 97%, at least 98%, at least 99% or 100% identity to SEQ ID NO:281; and a CDR3 comprising an amino acid sequence having at least 80%, at least 85%, at least 90%, at least 91%, at least 92%, at least 93%, at least 94%, at least 95%, at least 96%, at least 97%, at least 98%, at least 99% or 100% identity to SEQ ID NO:282; (iv) VH4 comprises a CDR1 comprising an amino acid sequence having at least 80%, at least 85%, at least 90%, at least 91%, at least 92%, at least 93%, at least 94%, at least 95%, at least 96%, at least 97%, at least 98%, at least 99% or 100% identity to SEQ ID NO:264; a CDR2 comprising an amino acid sequence having at least 80%, at least 85%, at least 90%, at least 91%, at least 92%, at least 93%, at least 94%, at least 95%, at least 96%, at least 97%, at least 98%, at least 99% or 100% identity to SEQ ID NO:265; and a CDR3 comprising an amino acid sequence having at least 80%, at least 85%, at least 90%, at least 91%, at least 92%, at least 93%, at least 94%, at least 95%, at least 96%, at least 97%, at least 98%, at least 99% or 100% identity to SEQ ID NO:266; (v) VL1 comprises a CDR1 comprising an amino acid sequence having at least 80%, at least 85%, at least 90%, at least 91%, at least 92%, at least 93%, at least 94%, at least 95%, at least 96%, at least 97%, at least 98%, at least 99% or 100% identity to SEQ ID NO:55; a CDR2 comprising an amino acid sequence having at least 80%, at least 85%, at least 90%, at least 91%, at least 92%, at least 93%, at least 94%, at least 95%, at least 96%, at least 97%, at least 98%, at least 99% or 100% identity to SEQ ID NO:56 (having the sequence of GTN); and a CDR3 comprising an amino acid sequence having at least 80%, at least 85%, at least 90%, at least 91%, at least 92%, at least 93%, at least 94%, at least 95%, at least 96%, at least 97%, at least 98%, at least 99% or 100% identity to SEQ ID NO:57; (vi) VL2 comprises a CDR1 comprising an amino acid sequence having at least 80%, at least 85%, at least 90%, at least 91%, at least 92%, at least 93%, at least 94%, at least 95%, at least 96%, at least 97%, at least 98%, at least 99% or 100% identity to SEQ ID NO:284; a CDR2 comprising an amino acid sequence having at least 80%, at least 85%, at least 90%, at least 91%, at least 92%, at least 93%, at least 94%, at least 95%, at least 96%, at least 97%, at least 98%, at least 99% or 100% identity to SEQ ID NO:285; and a CDR3 comprising an amino acid sequence having at least 80%, at least 85%, at least 90%, at least 91%, at least 92%, at least 93%, at least 94%, at least 95%, at least 96%, at least 97%, at least 98%, at least 99% or 100% identity to SEQ ID NO:286; (vii) VL3 comprises a CDR1 comprising an amino acid sequence having at least 80%, at least 85%, at least 90%, at least 91%, at least 92%, at least 93%, at least 94%, at least 95%, at least 96%, at least 97%, at least 98%, at least 99% or 100% identity to SEQ ID NO:276; a CDR2 comprising an amino acid sequence having at least 80%, at least 85%, at least 90%, at least 91%, at least 92%, at least 93%, at least 94%, at least 95%, at least 96%, at least 97%, at least 98%, at least 99% or 100% identity to SEQ ID NO:277 (having the sequence of LGS); and a CDR3 comprising an amino acid sequence having at least 80%, at least 85%, at least 90%, at least 91%, at least 92%, at least 93%, at least 94%, at least 95%, at least 96%, at least 97%, at least 98%, at least 99% or 100% identity to SEQ ID NO:278; and (viii) VL4 comprises a CDR1 comprising an amino acid sequence having at least 80%, at least 85%, at least 90%, at least 91%, at least 92%, at least 93%, at least 94%, at least 95%, at least 96%, at least 97%, at least 98%, at least 99% or 100% identity to SEQ ID NO:260; a CDR2 comprising an amino acid sequence having at least 80%, at least 85%, at least 90%, at least 91%, at least 92%, at least 93%, at least 94%, at least 95%, at least 96%, at least 97%, at least 98%, at least 99% or 100% identity to SEQ ID NO:261; and a CDR3 comprising an amino acid sequence having at least 80%, at least 85%, at least 90%, at least 91%, at least 92%, at least 93%, at least 94%, at least 95%, at least 96%, at least 97%, at least 98%, at least 99% or 100% identity to SEQ ID NO:262. In some aspects, (i) VH1 comprises a CDR1 comprising the amino acid sequence of SEQ ID NO:59; a CDR2 comprising the amino acid sequence of SEQ ID NO:60; and a CDR3 comprising the amino acid sequence of SEQ ID NO:61; (ii) VH2 comprises a CDR1 comprising the amino acid sequence of SEQ ID NO:288; a CDR2 comprising the amino acid sequence of SEQ ID NO:289; and a CDR3 comprising the amino acid sequence of SEQ ID NO:290; (iii) VH3 comprises a CDR1 comprising the amino acid sequence of SEQ ID NO:280; a CDR2 comprising the amino acid sequence of SEQ ID NO:281; and a CDR3 comprising the amino acid sequence of SEQ ID NO:282; (iv) VH4 comprises a CDR1 comprising the amino acid sequence of SEQ ID NO:264; a CDR2 comprising the amino acid sequence of SEQ ID NO:265; and a CDR3 comprising the amino acid sequence of SEQ ID NO:266; (v) VL1 comprises a CDR1 comprising the amino acid sequence of SEQ ID NO:55; a CDR2 comprising the amino acid sequence of SEQ ID NO:56 (having the sequence of GTN); and a CDR3 comprising the amino acid sequence of SEQ ID NO:57; (vi) VL2 comprises a CDR1 comprising the amino acid sequence of SEQ ID NO:284; a CDR2 comprising the amino acid sequence of SEQ ID NO:285; and a CDR3 comprising the amino acid sequence of SEQ ID NO:286; (vii) VL3 comprises a CDR1 comprising the amino acid sequence of SEQ ID NO:276; a CDR2 comprising the amino acid sequence of SEQ ID NO:277 (having the sequence of LGS); and a CDR3 comprising the amino acid sequence of SEQ ID NO:278; and (viii) VL4 comprises a CDR1 comprising the amino acid sequence of SEQ ID NO:260; a CDR2 comprising the amino acid sequence of SEQ ID NO:261; and a CDR3 comprising the amino acid sequence of SEQ ID NO:262. In some aspects, L1-L16 comprise the amino acid sequence of any one of SEQ ID NOs:1-34, wherein SEQ ID NO:1 has the amino acid sequence of G, SEQ ID NO:2 has the amino acid sequence of A, SEQ ID NO:3 has the amino acid sequence of GSS and SEQ ID NO:4 has the amino acid sequence of ASG. In some aspects, L1 or L4 and L7 or L10 comprise the amino acid sequence of SEQ ID NO:6; L2 or L5 and L8 or L11 comprise the amino acid sequence of SEQ ID NO:27; and L3 or L6 and L9 or L12 comprise the amino acid sequence of SEQ ID NO:6. In some aspects, L1 or L5 and L9 or L13 comprise the amino acid sequence of SEQ ID NO:6; L2 or L6 and L10 or L14 comprise the amino acid sequence of SEQ ID NO:27; L3 or L7 and L11 or L15 comprise the amino acid sequence of SEQ ID NO:6; and L4 or L8 and L12 or L16 comprise the amino acid sequence of SEQ ID NO:12. In some aspects, Fc comprises a knob-into-hole modification or Fc effector function knockout mutation. In some aspects, Fc comprises an amino acid sequence having at least 80%, at least 85%, at least 90%, at least 91%, at least 92%, at least 93%, at least 94%, at least 95%, at least 96%, at least 97%, at least 98%, at least 99%, or 100% identity to SEQ ID NO:293 or 294. In some aspects, Fc comprises the amino acid sequence of SEQ ID NO:293 or 294. In some preferred aspects, CDR1, CDR2 and CDR3 of each of VH1, VH2, VH3, VH4, VL1, VL2, VL3 and VL4 have at least 90% identity with the corresponding amino acid sequences specified above, optionally with (i) an Fc having at least 90% identity with the corresponding amino acid sequence recited above; and/or (ii) one or more linker sequence as specified above. In some particularly preferred aspects, CDR1, CDR2 and CDR3 of each of VH1, VH2, VH3, VH4, VL1, VL2, VL3 and VL4 comprise or consist of the corresponding amino acid sequences specified above, optionally with (i) an Fc comprising or consisting of the corresponding amino acid sequence recited above; and/or (ii) one or more linker sequence as specified above.

[0690] In some aspects, (i) VH1 comprises a CDR1 comprising an amino acid sequence having at least 80%, at least 85%, at least 90%, at least 91%, at least 92%, at least 93%, at least 94%, at least 95%, at least 96%, at least 97%, at least 98%, at least 99% or 100% identity to SEQ ID NO:59; a CDR2 comprising an amino acid sequence having at least 80%, at least 85%, at least 90%, at least 91%, at least 92%, at least 93%, at least 94%, at least 95%, at least 96%, at least 97%, at least 98%, at least 99% or 100% identity to SEQ ID NO:60; and a CDR3 comprising an amino acid sequence having at least 80%, at least 85%, at least 90%, at least 91%, at least 92%, at least 93%, at least 94%, at least 95%, at least 96%, at least 97%, at least 98%, at least 99% or 100% identity to SEQ ID NO:61; (ii) VH2 comprises a CDR1 comprising an amino acid sequence having at least 80%, at least 85%, at least 90%, at least 91%, at least 92%, at least 93%, at least 94%, at least 95%, at least 96%, at least 97%, at least 98%, at least 99% or 100% identity to SEQ ID NO:264; a CDR2 comprising an amino acid sequence having at least 80%, at least 85%, at least 90%, at least 91%, at least 92%, at least 93%, at least 94%, at least 95%, at least 96%, at least 97%, at least 98%, at least 99% or 100% identity to SEQ ID NO:265; and a CDR3 comprising an amino acid sequence having at least 80%, at least 85%, at least 90%, at least 91%, at least 92%, at least 93%, at least 94%, at least 95%, at least 96%, at least 97%, at least 98%, at least 99% or 100% identity to SEQ ID NO:266; (iii) VH3 comprises a CDR1 comprising an amino acid sequence having at least 80%, at least 85%, at least 90%, at least 91%, at least 92%, at least 93%, at least 94%, at least 95%, at least 96%, at least 97%, at least 98%, at least 99% or 100% identity to SEQ ID NO:272; a CDR2 comprising an amino acid sequence having at least 80%, at least 85%, at least 90%, at least 91%, at least 92%, at least 93%, at least 94%, at least 95%, at least 96%, at least 97%, at least 98%, at least 99% or 100% identity to SEQ ID NO:273; and a CDR3 comprising an amino acid sequence having at least 80%, at least 85%, at least 90%, at least 91%, at least 92%, at least 93%, at least 94%, at least 95%, at least 96%, at least 97%, at least 98%, at least 99% or 100% identity to SEQ ID NO:274; (iv) VH4 comprises a CDR1 comprising an amino acid sequence having at least 80%, at least 85%, at least 90%, at least 91%, at least 92%, at least 93%, at least 94%, at least 95%, at least 96%, at least 97%, at least 98%, at least 99% or 100% identity to SEQ ID NO:280; a CDR2 comprising an amino acid sequence having at least 80%, at least 85%, at least 90%, at least 91%, at least 92%, at least 93%, at least 94%, at least 95%, at least 96%, at least 97%, at least 98%, at least 99% or 100% identity to SEQ ID NO:281; and a CDR3 comprising an amino acid sequence having at least 80%, at least 85%, at least 90%, at least 91%, at least 92%, at least 93%, at least 94%, at least 95%, at least 96%, at least 97%, at least 98%, at least 99% or 100% identity to SEQ ID NO:282; (v) VL1 comprises a CDR1 comprising an amino acid sequence having at least 80%, at least 85%, at least 90%, at least 91%, at least 92%, at least 93%, at least 94%, at least 95%, at least 96%, at least 97%, at least 98%, at least 99% or 100% identity to SEQ ID NO:55; a CDR2 comprising an amino acid sequence having at least 80%, at least 85%, at least 90%, at least 91%, at least 92%, at least 93%, at least 94%, at least 95%, at least 96%, at least 97%, at least 98%, at least 99% or 100% identity to SEQ ID NO:56 (having the sequence of GTN); and a CDR3 comprising an amino acid sequence having at least 80%, at least 85%, at least 90%, at least 91%, at least 92%, at least 93%, at least 94%, at least 95%, at least 96%, at least 97%, at least 98%, at least 99% or 100% identity to SEQ ID NO:57; (vi) VL2 comprises a CDR1 comprising an amino acid sequence having at least 80%, at least 85%, at least 90%, at least 91%, at least 92%, at least 93%, at least 94%, at least 95%, at least 96%, at least 97%, at least 98%, at least 99% or 100% identity to SEQ ID NO:260; a CDR2 comprising an amino acid sequence having at least 80%, at least 85%, at least 90%, at least 91%, at least 92%, at least 93%, at least 94%, at least 95%, at least 96%, at least 97%, at least 98%, at least 99% or 100% identity to SEQ ID NO:261; and a CDR3 comprising an amino acid sequence having at least 80%, at least 85%, at least 90%, at least 91%, at least 92%, at least 93%, at least 94%, at least 95%, at least 96%, at least 97%, at least 98%, at least 99% or 100% identity to SEQ ID NO:262; (vii) VL3 comprises a CDR1 comprising an amino acid sequence having at least 80%, at least 85%, at least 90%, at least 91%, at least 92%, at least 93%, at least 94%, at least 95%, at least 96%, at least 97%, at least 98%, at least 99% or 100% identity to SEQ ID NO:268; a CDR2 comprising an amino acid sequence having at least 80%, at least 85%, at least 90%, at least 91%, at least 92%, at least 93%, at least 94%, at least 95%, at least 96%, at least 97%, at least 98%, at least 99% or 100% identity to SEQ ID NO:269 (having the sequence of GAS); and a CDR3 comprising an amino acid sequence having at least 80%, at least 85%, at least 90%, at least 91%, at least 92%, at least 93%, at least 94%, at least 95%, at least 96%, at least 97%, at least 98%, at least 99% or 100% identity to SEQ ID NO:270; and (viii) VL4 comprises a CDR1 comprising an amino acid sequence having at least 80%, at least 85%, at least 90%, at least 91%, at least 92%, at least 93%, at least 94%, at least 95%, at least 96%, at least 97%, at least 98%, at least 99% or 100% identity to SEQ ID NO:276; a CDR2 comprising an amino acid sequence having at least 80%, at least 85%, at least 90%, at least 91%, at least 92%, at least 93%, at least 94%, at least 95%, at least 96%, at least 97%, at least 98%, at least 99% or 100% identity to SEQ ID NO:277 (having the sequence of LGS); and a CDR3 comprising an amino acid sequence having at least 80%, at least 85%, at least 90%, at least 91%, at least 92%, at least 93%, at least 94%, at least 95%, at least 96%, at least 97%, at least 98%, at least 99% or 100% identity to SEQ ID NO:278. In some aspects, (i) VH1 comprises a CDR1 comprising the amino acid sequence of SEQ ID NO:59; a CDR2 comprising the amino acid sequence of SEQ ID NO:60; and a CDR3 comprising the amino acid sequence of SEQ ID NO:61; (ii) VH2 comprises a CDR1 comprising the amino acid sequence of SEQ ID NO:264; a CDR2 comprising the amino acid sequence of SEQ ID NO:265; and a CDR3 comprising the amino acid sequence of SEQ ID NO:266; (iii) VH3 comprises a CDR1 comprising the amino acid sequence of SEQ ID NO:272; a CDR2 comprising the amino acid sequence of SEQ ID NO:273; and a CDR3 comprising the amino acid sequence of SEQ ID NO:274; (iv) VH4 comprises a CDR1 comprising the amino acid sequence of SEQ ID NO:280; a CDR2 comprising the amino acid sequence of SEQ ID NO:281; and a CDR3 comprising the amino acid sequence of SEQ ID NO:282; (v) VL1 comprises a CDR1 comprising the amino acid sequence of SEQ ID NO:55; a CDR2 comprising the amino acid sequence of SEQ ID NO:56 (having the sequence of GTN); and a CDR3 comprising the amino acid sequence of SEQ ID NO:57; (vi) VL2 comprises a CDR1 comprising the amino acid sequence of SEQ ID NO:260; a CDR2 comprising the amino acid sequence of SEQ ID NO:261; and a CDR3 comprising the amino acid sequence of SEQ ID NO:262; (vii) VL3 comprises a CDR1 comprising the amino acid sequence of SEQ ID NO:268; a CDR2 comprising the amino acid sequence of SEQ ID NO:269 (having the sequence of GAS); and a CDR3 comprising the amino acid sequence of SEQ ID NO:270; and (viii) VL4 comprises a CDR1 comprising the amino acid sequence of SEQ ID NO:276; a CDR2 comprising the amino acid sequence of SEQ ID NO:277 (having the sequence of LGS); and a CDR3 comprising the amino acid sequence of SEQ ID NO:278. In some aspects, L1-L16 comprise the amino acid sequence of any one of SEQ ID NOs:1-34, wherein SEQ ID NO:1 has the amino acid sequence of G, SEQ ID NO:2 has the amino acid sequence of A, SEQ ID NO:3 has the amino acid sequence of GSS and SEQ ID NO:4 has the amino acid sequence of ASG. In some aspects, L1 or L4 and L7 or L10 comprise the amino acid sequence of SEQ ID NO:6; L2 or L5 and L8 or L11 comprise the amino acid sequence of SEQ ID NO:27; and L3 or L6 and L9 or L12 comprise the amino acid sequence of SEQ ID NO:6. In some aspects, L1 or L5 and L9 or L13 comprise the amino acid sequence of SEQ ID NO:6; L2 or L6 and L10 or L14 comprise the amino acid sequence of SEQ ID NO:27; L3 or L7 and L11 or L15 comprise the amino acid sequence of SEQ ID NO:6; and L4 or L8 and L12 or L16 comprise the amino acid sequence of SEQ ID NO:12. In some aspects, Fc comprises a knob-into-hole modification or Fc effector function knockout mutation. In some aspects, Fc comprises an amino acid sequence having at least 80%, at least 85%, at least 90%, at least 91%, at least 92%, at least 93%, at least 94%, at least 95%, at least 96%, at least 97%, at least 98%, at least 99%, or 100% identity to SEQ ID NO:293 or 294. In some aspects, Fc comprises the amino acid sequence of SEQ ID NO:293 or 294. In some preferred aspects, CDR1, CDR2 and CDR3 of each of VH1, VH2, VH3, VH4, VL1, VL2, VL3 and VL4 have at least 90% identity with the corresponding amino acid sequences specified above, optionally with (i) an Fc having at least 90% identity with the corresponding amino acid sequence recited above; and/or (ii) one or more linker sequence as specified above. In some particularly preferred aspects, CDR1, CDR2 and CDR3 of each of VH1, VH2, VH3, VH4, VL1, VL2, VL3 and VL4 comprise or consist of the corresponding amino acid sequences specified above, optionally with (i) an Fc comprising or consisting of the corresponding amino acid sequence recited above; and/or (ii) one or more linker sequence as specified above.

[0691] In some aspects, (i) VH1 comprises a CDR1 comprising an amino acid sequence having at least 80%, at least 85%, at least 90%, at least 91%, at least 92%, at least 93%, at least 94%, at least 95%, at least 96%, at least 97%, at least 98%, at least 99% or 100% identity to SEQ ID NO:59; a CDR2 comprising an amino acid sequence having at least 80%, at least 85%, at least 90%, at least 91%, at least 92%, at least 93%, at least 94%, at least 95%, at least 96%, at least 97%, at least 98%, at least 99% or 100% identity to SEQ ID NO:60; and a CDR3 comprising an amino acid sequence having at least 80%, at least 85%, at least 90%, at least 91%, at least 92%, at least 93%, at least 94%, at least 95%, at least 96%, at least 97%, at least 98%, at least 99% or 100% identity to SEQ ID NO:61; (ii) VH2 comprises a CDR1 comprising an amino acid sequence having at least 80%, at least 85%, at least 90%, at least 91%, at least 92%, at least 93%, at least 94%, at least 95%, at least 96%, at least 97%, at least 98%, at least 99% or 100% identity to SEQ ID NO:264; a CDR2 comprising an amino acid sequence having at least 80%, at least 85%, at least 90%, at least 91%, at least 92%, at least 93%, at least 94%, at least 95%, at least 96%, at least 97%, at least 98%, at least 99% or 100% identity to SEQ ID NO:265; and a CDR3 comprising an amino acid sequence having at least 80%, at least 85%, at least 90%, at least 91%, at least 92%, at least 93%, at least 94%, at least 95%, at least 96%, at least 97%, at least 98%, at least 99% or 100% identity to SEQ ID NO:266; (iii) VH3 comprises a CDR1 comprising an amino acid sequence having at least 80%, at least 85%, at least 90%, at least 91%, at least 92%, at least 93%, at least 94%, at least 95%, at least 96%, at least 97%, at least 98%, at least 99% or 100% identity to SEQ ID NO:280; a CDR2 comprising an amino acid sequence having at least 80%, at least 85%, at least 90%, at least 91%, at least 92%, at least 93%, at least 94%, at least 95%, at least 96%, at least 97%, at least 98%, at least 99% or 100% identity to SEQ ID NO:281; and a CDR3 comprising an amino acid sequence having at least 80%, at least 85%, at least 90%, at least 91%, at least 92%, at least 93%, at least 94%, at least 95%, at least 96%, at least 97%, at least 98%, at least 99% or 100% identity to SEQ ID NO:282; (iv) VH4 comprises a CDR1 comprising an amino acid sequence having at least 80%, at least 85%, at least 90%, at least 91%, at least 92%, at least 93%, at least 94%, at least 95%, at least 96%, at least 97%, at least 98%, at least 99% or 100% identity to SEQ ID NO:288; a CDR2 comprising an amino acid sequence having at least 80%, at least 85%, at least 90%, at least 91%, at least 92%, at least 93%, at least 94%, at least 95%, at least 96%, at least 97%, at least 98%, at least 99% or 100% identity to SEQ ID NO:289; and a CDR3 comprising an amino acid sequence having at least 80%, at least 85%, at least 90%, at least 91%, at least 92%, at least 93%, at least 94%, at least 95%, at least 96%, at least 97%, at least 98%, at least 99% or 100% identity to SEQ ID NO:290; (v) VL1 comprises a CDR1 comprising an amino acid sequence having at least 80%, at least 85%, at least 90%, at least 91%, at least 92%, at least 93%, at least 94%, at least 95%, at least 96%, at least 97%, at least 98%, at least 99% or 100% identity to SEQ ID NO:55; a CDR2 comprising an amino acid sequence having at least 80%, at least 85%, at least 90%, at least 91%, at least 92%, at least 93%, at least 94%, at least 95%, at least 96%, at least 97%, at least 98%, at least 99% or 100% identity to SEQ ID NO:56 (having the sequence of GTN); and a CDR3 comprising an amino acid sequence having at least 80%, at least 85%, at least 90%, at least 91%, at least 92%, at least 93%, at least 94%, at least 95%, at least 96%, at least 97%, at least 98%, at least 99% or 100% identity to SEQ ID NO:57; (vi) VL2 comprises a CDR1 comprising an amino acid sequence having at least 80%, at least 85%, at least 90%, at least 91%, at least 92%, at least 93%, at least 94%, at least 95%, at least 96%, at least 97%, at least 98%, at least 99% or 100% identity to SEQ ID NO:260; a CDR2 comprising an amino acid sequence having at least 80%, at least 85%, at least 90%, at least 91%, at least 92%, at least 93%, at least 94%, at least 95%, at least 96%, at least 97%, at least 98%, at least 99% or 100% identity to SEQ ID NO:261; and a CDR3 comprising an amino acid sequence having at least 80%, at least 85%, at least 90%, at least 91%, at least 92%, at least 93%, at least 94%, at least 95%, at least 96%, at least 97%, at least 98%, at least 99% or 100% identity to SEQ ID NO:262; (vii) VL3 comprises a CDR1 comprising an amino acid sequence having at least 80%, at least 85%, at least 90%, at least 91%, at least 92%, at least 93%, at least 94%, at least 95%, at least 96%, at least 97%, at least 98%, at least 99% or 100% identity to SEQ ID NO:276; a CDR2 comprising an amino acid sequence having at least 80%, at least 85%, at least 90%, at least 91%, at least 92%, at least 93%, at least 94%, at least 95%, at least 96%, at least 97%, at least 98%, at least 99% or 100% identity to SEQ ID NO:277 (having the sequence of LGS); and a CDR3 comprising an amino acid sequence having at least 80%, at least 85%, at least 90%, at least 91%, at least 92%, at least 93%, at least 94%, at least 95%, at least 96%, at least 97%, at least 98%, at least 99% or 100% identity to SEQ ID NO:278; and (viii) VL4 comprises a CDR1 comprising an amino acid sequence having at least 80%, at least 85%, at least 90%, at least 91%, at least 92%, at least 93%, at least 94%, at least 95%, at least 96%, at least 97%, at least 98%, at least 99% or 100% identity to SEQ ID NO:284; a CDR2 comprising an amino acid sequence having at least 80%, at least 85%, at least 90%, at least 91%, at least 92%, at least 93%, at least 94%, at least 95%, at least 96%, at least 97%, at least 98%, at least 99% or 100% identity to SEQ ID NO:285; and a CDR3 comprising an amino acid sequence having at least 80%, at least 85%, at least 90%, at least 91%, at least 92%, at least 93%, at least 94%, at least 95%, at least 96%, at least 97%, at least 98%, at least 99% or 100% identity to SEQ ID NO:286. In some aspects, (i) VH1 comprises a CDR1 comprising the amino acid sequence of SEQ ID NO:59; a CDR2 comprising the amino acid sequence of SEQ ID NO:60; and a CDR3 comprising the amino acid sequence of SEQ ID NO:61; (ii) VH2 comprises a CDR1 comprising the amino acid sequence of SEQ ID NO:264; a CDR2 comprising the amino acid sequence of SEQ ID NO:265; and a CDR3 comprising the amino acid sequence of SEQ ID NO:266; (iii) VH3 comprises a CDR1 comprising the amino acid sequence of SEQ ID NO:280; a CDR2 comprising the amino acid sequence of SEQ ID NO:281; and a CDR3 comprising the amino acid sequence of SEQ ID NO:282; (iv) VH4 comprises a CDR1 comprising the amino acid sequence of SEQ ID NO:288; a CDR2 comprising the amino acid sequence of SEQ ID NO:289; and a CDR3 comprising the amino acid sequence of SEQ ID NO:290; (v) VL1 comprises a CDR1 comprising the amino acid sequence of SEQ ID NO:55; a CDR2 comprising the amino acid sequence of SEQ ID NO:56 (having the sequence of GTN); and a CDR3 comprising the amino acid sequence of SEQ ID NO:57; (vi) VL2 comprises a CDR1 comprising the amino acid sequence of SEQ ID NO:260; a CDR2 comprising the amino acid sequence of SEQ ID NO:261; and a CDR3 comprising the amino acid sequence of SEQ ID NO:262; (vii) VL3 comprises a CDR1 comprising the amino acid sequence of SEQ ID NO:276; a CDR2 comprising the amino acid sequence of SEQ ID NO:277 (having the sequence of LGS); and a CDR3 comprising the amino acid sequence of SEQ ID NO:278; and (viii) VL4 comprises a CDR1 comprising the amino acid sequence of SEQ ID NO:284; a CDR2 comprising the amino acid sequence of SEQ ID NO:285; and a CDR3 comprising the amino acid sequence of SEQ ID NO:286. In some aspects, L1-L16 comprise the amino acid sequence of any one of SEQ ID NOs:1-34, wherein SEQ ID NO:1 has the amino acid sequence of G, SEQ ID NO:2 has the amino acid sequence of A, SEQ ID NO:3 has the amino acid sequence of GSS and SEQ ID NO:4 has the amino acid sequence of ASG. In some aspects, L1 or L4 and L7 or L10 comprise the amino acid sequence of SEQ ID NO:6; L2 or L5 and L8 or L11 comprise the amino acid sequence of SEQ ID NO:27; and L3 or L6 and L9 or L12 comprise the amino acid sequence of SEQ ID NO:6. In some aspects, L1 or L5 and L9 or L13 comprise the amino acid sequence of SEQ ID NO:6; L2 or L6 and L10 or L14 comprise the amino acid sequence of SEQ ID NO:27; L3 or L7 and L11 or L15 comprise the amino acid sequence of SEQ ID NO:6; and L4 or L8 and L12 or L16 comprise the amino acid sequence of SEQ ID NO:12. In some aspects, Fc comprises a knob-into-hole modification or Fc effector function knockout mutation. In some aspects, Fc comprises an amino acid sequence having at least 80%, at least 85%, at least 90%, at least 91%, at least 92%, at least 93%, at least 94%, at least 95%, at least 96%, at least 97%, at least 98%, at least 99%, or 100% identity to SEQ ID NO:293 or 294. In some aspects, Fc comprises the amino acid sequence of SEQ ID NO:293 or 294. In some preferred aspects, CDR1, CDR2 and CDR3 of each of VH1, VH2, VH3, VH4, VL1, VL2, VL3 and VL4 have at least 90% identity with the corresponding amino acid sequences specified above, optionally with (i) an Fc having at least 90% identity with the corresponding amino acid sequence recited above; and/or (ii) one or more linker sequence as specified above. In some particularly preferred aspects, CDR1, CDR2 and CDR3 of each of VH1, VH2, VH3, VH4, VL1, VL2, VL3 and VL4 comprise or consist of the corresponding amino acid sequences specified above, optionally with (i) an Fc comprising or consisting of the corresponding amino acid sequence recited above; and/or (ii) one or more linker sequence as specified above.

[0692] In some aspects, (i) VH1 comprises a CDR1 comprising an amino acid sequence having at least 80%, at least 85%, at least 90%, at least 91%, at least 92%, at least 93%, at least 94%, at least 95%, at least 96%, at least 97%, at least 98%, at least 99% or 100% identity to SEQ ID NO:59; a CDR2 comprising an amino acid sequence having at least 80%, at least 85%, at least 90%, at least 91%, at least 92%, at least 93%, at least 94%, at least 95%, at least 96%, at least 97%, at least 98%, at least 99% or 100% identity to SEQ ID NO:60; and a CDR3 comprising an amino acid sequence having at least 80%, at least 85%, at least 90%, at least 91%, at least 92%, at least 93%, at least 94%, at least 95%, at least 96%, at least 97%, at least 98%, at least 99% or 100% identity to SEQ ID NO:61; (ii) VH2 comprises a CDR1 comprising an amino acid sequence having at least 80%, at least 85%, at least 90%, at least 91%, at least 92%, at least 93%, at least 94%, at least 95%, at least 96%, at least 97%, at least 98%, at least 99% or 100% identity to SEQ ID NO:272; a CDR2 comprising an amino acid sequence having at least 80%, at least 85%, at least 90%, at least 91%, at least 92%, at least 93%, at least 94%, at least 95%, at least 96%, at least 97%, at least 98%, at least 99% or 100% identity to SEQ ID NO:273; and a CDR3 comprising an amino acid sequence having at least 80%, at least 85%, at least 90%, at least 91%, at least 92%, at least 93%, at least 94%, at least 95%, at least 96%, at least 97%, at least 98%, at least 99% or 100% identity to SEQ ID NO:274; (iii) VH3 comprises a CDR1 comprising an amino acid sequence having at least 80%, at least 85%, at least 90%, at least 91%, at least 92%, at least 93%, at least 94%, at least 95%, at least 96%, at least 97%, at least 98%, at least 99% or 100% identity to SEQ ID NO:280; a CDR2 comprising an amino acid sequence having at least 80%, at least 85%, at least 90%, at least 91%, at least 92%, at least 93%, at least 94%, at least 95%, at least 96%, at least 97%, at least 98%, at least 99% or 100% identity to SEQ ID NO:281; and a CDR3 comprising an amino acid sequence having at least 80%, at least 85%, at least 90%, at least 91%, at least 92%, at least 93%, at least 94%, at least 95%, at least 96%, at least 97%, at least 98%, at least 99% or 100% identity to SEQ ID NO:282; (iv) VH4 comprises a CDR1 comprising an amino acid sequence having at least 80%, at least 85%, at least 90%, at least 91%, at least 92%, at least 93%, at least 94%, at least 95%, at least 96%, at least 97%, at least 98%, at least 99% or 100% identity to SEQ ID NO:288; a CDR2 comprising an amino acid sequence having at least 80%, at least 85%, at least 90%, at least 91%, at least 92%, at least 93%, at least 94%, at least 95%, at least 96%, at least 97%, at least 98%, at least 99% or 100% identity to SEQ ID NO:289; and a CDR3 comprising an amino acid sequence having at least 80%, at least 85%, at least 90%, at least 91%, at least 92%, at least 93%, at least 94%, at least 95%, at least 96%, at least 97%, at least 98%, at least 99% or 100% identity to SEQ ID NO:290; (v) VL1 comprises a CDR1 comprising an amino acid sequence having at least 80%, at least 85%, at least 90%, at least 91%, at least 92%, at least 93%, at least 94%, at least 95%, at least 96%, at least 97%, at least 98%, at least 99% or 100% identity to SEQ ID NO:55; a CDR2 comprising an amino acid sequence having at least 80%, at least 85%, at least 90%, at least 91%, at least 92%, at least 93%, at least 94%, at least 95%, at least 96%, at least 97%, at least 98%, at least 99% or 100% identity to SEQ ID NO:56 (having the sequence of GTN); and a CDR3 comprising an amino acid sequence having at least 80%, at least 85%, at least 90%, at least 91%, at least 92%, at least 93%, at least 94%, at least 95%, at least 96%, at least 97%, at least 98%, at least 99% or 100% identity to SEQ ID NO:57; (vi) VL2 comprises a CDR1 comprising an amino acid sequence having at least 80%, at least 85%, at least 90%, at least 91%, at least 92%, at least 93%, at least 94%, at least 95%, at least 96%, at least 97%, at least 98%, at least 99% or 100% identity to SEQ ID NO:268; a CDR2 comprising an amino acid sequence having at least 80%, at least 85%, at least 90%, at least 91%, at least 92%, at least 93%, at least 94%, at least 95%, at least 96%, at least 97%, at least 98%, at least 99% or 100% identity to SEQ ID NO:269 (having the sequence of GAS); and a CDR3 comprising an amino acid sequence having at least 80%, at least 85%, at least 90%, at least 91%, at least 92%, at least 93%, at least 94%, at least 95%, at least 96%, at least 97%, at least 98%, at least 99% or 100% identity to SEQ ID NO:270; (vii) VL3 comprises a CDR1 comprising an amino acid sequence having at least 80%, at least 85%, at least 90%, at least 91%, at least 92%, at least 93%, at least 94%, at least 95%, at least 96%, at least 97%, at least 98%, at least 99% or 100% identity to SEQ ID NO:276; a CDR2 comprising an amino acid sequence having at least 80%, at least 85%, at least 90%, at least 91%, at least 92%, at least 93%, at least 94%, at least 95%, at least 96%, at least 97%, at least 98%, at least 99% or 100% identity to SEQ ID NO:277 (having the sequence of LGS); and a CDR3 comprising an amino acid sequence having at least 80%, at least 85%, at least 90%, at least 91%, at least 92%, at least 93%, at least 94%, at least 95%, at least 96%, at least 97%, at least 98%, at least 99% or 100% identity to SEQ ID NO:278; and (viii) VL4 comprises a CDR1 comprising an amino acid sequence having at least 80%, at least 85%, at least 90%, at least 91%, at least 92%, at least 93%, at least 94%, at least 95%, at least 96%, at least 97%, at least 98%, at least 99% or 100% identity to SEQ ID NO:284; a CDR2 comprising an amino acid sequence having at least 80%, at least 85%, at least 90%, at least 91%, at least 92%, at least 93%, at least 94%, at least 95%, at least 96%, at least 97%, at least 98%, at least 99% or 100% identity to SEQ ID NO:285; and a CDR3 comprising an amino acid sequence having at least 80%, at least 85%, at least 90%, at least 91%, at least 92%, at least 93%, at least 94%, at least 95%, at least 96%, at least 97%, at least 98%, at least 99% or 100% identity to SEQ ID NO:286. In some aspects, (i) VH1 comprises a CDR1 comprising the amino acid sequence of SEQ ID NO:59; a CDR2 comprising the amino acid sequence of SEQ ID NO:60; and a CDR3 comprising the amino acid sequence of SEQ ID NO:61; (ii) VH2 comprises a CDR1 comprising the amino acid sequence of SEQ ID NO:272; a CDR2 comprising the amino acid sequence of SEQ ID NO:273; and a CDR3 comprising the amino acid sequence of SEQ ID NO:274; (iii) VH3 comprises a CDR1 comprising the amino acid sequence of SEQ ID NO:280; a CDR2 comprising the amino acid sequence of SEQ ID NO:281; and a CDR3 comprising the amino acid sequence of SEQ ID NO:282; (iv) VH4 comprises a CDR1 comprising the amino acid sequence of SEQ ID NO:288; a CDR2 comprising the amino acid sequence of SEQ ID NO:289; and a CDR3 comprising the amino acid sequence of SEQ ID NO:290; (v) VL1 comprises a CDR1 comprising the amino acid sequence of SEQ ID NO:55; a CDR2 comprising the amino acid sequence of SEQ ID NO:56 (having the sequence of GTN); and a CDR3 comprising the amino acid sequence of SEQ ID NO:57; (vi) VL2 comprises a CDR1 comprising the amino acid sequence of SEQ ID NO:268; a CDR2 comprising the amino acid sequence of SEQ ID NO:269 (having the sequence of GAS); and a CDR3 comprising the amino acid sequence of SEQ ID NO:270; (vii) VL3 comprises a CDR1 comprising the amino acid sequence of SEQ ID NO:276; a CDR2 comprising the amino acid sequence of SEQ ID NO:277 (having the sequence of LGS); and a CDR3 comprising the amino acid sequence of SEQ ID NO:278; and (viii) VL4 comprises a CDR1 comprising the amino acid sequence of SEQ ID NO:284; a CDR2 comprising the amino acid sequence of SEQ ID NO:285; and a CDR3 comprising the amino acid sequence of SEQ ID NO:286. In some aspects, L1-L16 comprise the amino acid sequence of any one of SEQ ID NOs:1-34, wherein SEQ ID NO:1 has the amino acid sequence of G, SEQ ID NO:2 has the amino acid sequence of A, SEQ ID NO:3 has the amino acid sequence of GSS and SEQ ID NO:4 has the amino acid sequence of ASG. In some aspects, L1 or L4 and L7 or L10 comprise the amino acid sequence of SEQ ID NO:6; L2 or L5 and L8 or L11 comprise the amino acid sequence of SEQ ID NO: 27; and L3 or L6 and L9 or L12 comprise the amino acid sequence of SEQ ID NO:6. In some aspects, L1 or L5 and L9 or L13 comprise the amino acid sequence of SEQ ID NO:6; L2 or L6 and L10 or L14 comprise the amino acid sequence of SEQ ID NO:27; L3 or L7 and L11 or L15 comprise the amino acid sequence of SEQ ID NO:6; and L4 or L8 and L12 or L16 comprise the amino acid sequence of SEQ ID NO:12. In some aspects, Fc comprises a knob-into-hole modification or Fc effector function knockout mutation. In some aspects, Fc comprises an amino acid sequence having at least 80%, at least 85%, at least 90%, at least 91%, at least 92%, at least 93%, at least 94%, at least 95%, at least 96%, at least 97%, at least 98%, at least 99%, or 100% identity to SEQ ID NO:293 or 294. In some aspects, Fc comprises the amino acid sequence of SEQ ID NO:293 or 294. In some preferred aspects, CDR1, CDR2 and CDR3 of each of VH1, VH2, VH3, VH4, VL1, VL2, VL3 and VL4 have at least 90% identity with the corresponding amino acid sequences specified above, optionally with (i) an Fc having at least 90% identity with the corresponding amino acid sequence recited above; and/or (ii) one or more linker sequence as specified above. In some particularly preferred aspects, CDR1, CDR2 and CDR3 of each of VH1, VH2, VH3, VH4, VL1, VL2, VL3 and VL4 comprise or consist of the corresponding amino acid sequences specified above, optionally with (i) an Fc comprising or consisting of the corresponding amino acid sequence recited above; and/or (ii) one or more linker sequence as specified above.

[0693] In some aspects, provided herein is an antigen binding polypeptide complex comprising a first polypeptide and a second polypeptide; wherein the first polypeptide has a structure represented by VL1-L1-VH1 or VH1-L2-VL1; wherein the second polypeptide has a structure represented by VL2-L3-VH2 or VH2-L4-VL2; wherein VL1 is a first immunoglobulin light chain variable region that specifically binds to a SARS-CoV-2 protein; VH1 is a first immunoglobulin heavy chain variable region that specifically binds to a SARS-CoV-2 protein; wherein VL2 is a second immunoglobulin light chain variable region that specifically binds to a SARS-CoV-2 protein; wherein VH2 is a second immunoglobulin heavy chain variable region that specifically binds to a SARS-CoV-2 protein; and L1-L4 are amino acid linkers. In some aspects, provided herein is an antigen binding polypeptide complex comprising a first polypeptide and a second polypeptide; wherein the first polypeptide has a structure represented by VL1-L1-VH1-L2-Fc or VH1-L3-VL1-L4-Fc; wherein the second polypeptide has a structure represented by VL2-L5-VH2-L6-Fc or VH2-L7-VL2-L8-Fc; wherein VL1 is a first immunoglobulin light chain variable region that specifically binds to a SARS-CoV-2 protein; VH1 is a first immunoglobulin heavy chain variable region that specifically binds to a SARS-CoV-2 protein; wherein VL2 is a second immunoglobulin light chain variable region that specifically binds to a SARS-CoV-2 protein; wherein VH2 is a second immunoglobulin heavy chain variable region that specifically binds to a SARS-CoV-2 protein; L1-L8 are amino acid linkers; and Fc is a region comprising an immunoglobulin heavy chain constant region 2 (CH2), an immunoglobulin heavy chain constant region 3 (CH3), and optionally, an immunoglobulin hinge. In some aspects, provided herein is an antigen binding polypeptide complex comprising a first polypeptide and a second polypeptide; wherein the first polypeptide has a structure represented by VL1-L1-VH1; the second polypeptide has a structure represented by VL2-L3-VH2 or VH2-L4-VL2; and wherein the first and/or second polypeptide may have an Fc as shown above. In some aspects, provided herein is an antigen binding polypeptide complex comprising a first polypeptide and a second polypeptide; wherein the first polypeptide has a structure represented by VH1-L2-VL1; the second polypeptide has a structure represented by VL2-L3-VH2 or VH2-L4-VL2; and wherein the first and/or second polypeptide may have an Fc as shown above.

[0694] In some aspects, VH1 and VH2 comprise an amino acid sequence having at least 80%, at least 85%, at least 90%, at least 91%, at least 92%, at least 93%, at least 94%, at least 95%, at least 96%, at least 97%, at least 98%, at least 99%, or 100% identity to SEQ ID NO:263; and VL1 and VL2 comprise an amino acid sequence having at least 80%, at least 85%, at least 90%, at least 91%, at least 92%, at least 93%, at least 94%, at least 95%, at least 96%, at least 97%, at least 98%, at least 99%, or 100% identity to SEQ ID NO:259. In some aspects, VH1 and VH2 comprise the amino acid sequence of SEQ ID NO:263; and VL1 and VL2 comprise the amino acid sequence of SEQ ID NO:259. In some aspects, L1 or L2 and L3 or L4 comprise the amino acid sequence of any one of SEQ ID NOs:1-34, wherein SEQ ID NO:1 has the amino acid sequence of G, SEQ ID NO:2 has the amino acid sequence of A, SEQ ID NO:3 has the amino acid sequence of GSS and SEQ ID NO:4 has the amino acid sequence of ASG. In some aspects, L1 or L2 and L3 or L4 comprise the amino acid sequence of SEQ ID NO:27. In some aspects, L1 or L3 and L5 or L7 comprise the amino acid sequence of any one of SEQ ID NOs:1-34, wherein SEQ ID NO:1 has the amino acid sequence of G, SEQ ID NO:2 has the amino acid sequence of A, SEQ ID NO:3 has the amino acid sequence of GSS and SEQ ID NO:4 has the amino acid sequence of ASG. In some aspects, L1 or L3 and L5 or L7 comprise the amino acid sequence of SEQ ID NO:27. In some aspects, L2 or L4 and L6 or L8 comprise the amino acid sequence of any one of SEQ ID NOs:1-34, wherein SEQ ID NO:1 has the amino acid sequence of G, SEQ ID NO:2 has the amino acid sequence of A, SEQ ID NO:3 has the amino acid sequence of GSS and SEQ ID NO:4 has the amino acid sequence of ASG. In some aspects, L2 or L4 and L6 or L8 comprise the amino acid sequence of SEQ ID NO:12. In some aspects, Fc comprises a knob-into-hole modification or Fc effector function knockout mutation. In some aspects, Fc comprises an amino acid sequence having at least 80%, at least 85%, at least 90%, at least 91%, at least 92%, at least 93%, at least 94%, at least 95%, at least 96%, at least 97%, at least 98%, at least 99%, or 100% identity to SEQ ID NO:37. In some aspects, Fc comprises the amino acid sequence of SEQ ID NO:37. In some preferred aspects, VH1, VH2, VL1 and VL2 have at least 90% identity with the corresponding amino acid sequences specified above, optionally with (i) an Fc having at least 90% identity with the corresponding amino acid sequence recited above; and/or (ii) one or more linker sequence as specified above. In some particularly preferred aspects, VH1, VH2, VL1 and VL2 comprise or consist of the corresponding amino acid sequences specified above, optionally with (i) an Fc comprising or consisting of the corresponding amino acid sequence recited above; and/or (ii) one or more linker sequence as specified above.

[0695] In some aspects, the first polypeptide comprises an amino acid sequence having at least 80%, at least 85%, at least 90%, at least 91%, at least 92%, at least 93%, at least 94%, at least 95%, at least 96%, at least 97%, at least 98%, at least 99%, or 100% identity to SEQ ID NO:329; and the second polypeptide comprises an amino acid sequence having at least 80%, at least 85%, at least 90%, at least 91%, at least 92%, at least 93%, at least 94%, at least 95%, at least 96%, at least 97%, at least 98%, at least 99%, or 100% identity to SEQ ID NO:329. In some aspects, both the first polypeptide and the second polypeptide have at least 90% identity to SEQ ID NO:329. In some aspects, the first polypeptide comprises the amino acid sequence of SEQ ID NO:329; and the second polypeptide comprises the amino acid sequence of SEQ ID NO:329. In some aspects, the first polypeptide comprises an amino acid sequence encoded by a polynucleotide having at least 80%, at least 85%, at least 90%, at least 91%, at least 92%, at least 93%, at least 94%, at least 95%, at least 96%, at least 97%, at least 98%, at least 99%, or 100% identity to SEQ ID NO:330; and the second polypeptide comprises an amino acid sequence encoded by a polynucleotide having at least 80%, at least 85%, at least 90%, at least 91%, at least 92%, at least 93%, at least 94%, at least 95%, at least 96%, at least 97%, at least 98%, at least 99%, or 100% identity to SEQ ID NO:330. In some aspects, both the first polypeptide and the second polypeptide comprise an amino acid sequence encoded by a polynucleotide having at least 90% identity to SEQ ID NO:330. In some aspects, the first polypeptide comprises an amino acid sequence encoded by the polynucleotide of SEQ ID NO:330; and the second polypeptide comprises an amino acid sequence encoded by the polynucleotide of SEQ ID NO:330.

[0696] In some aspects, VH1 and VH2 comprise an amino acid sequence having at least 80%, at least 85%, at least 90%, at least 91%, at least 92%, at least 93%, at least 94%, at least 95%, at least 96%, at least 97%, at least 98%, at least 99%, or 100% identity to SEQ ID NO:271; and VL1 and VL2 comprise an amino acid sequence having at least 80%, at least 85%, at least 90%, at least 91%, at least 92%, at least 93%, at least 94%, at least 95%, at least 96%, at least 97%, at least 98%, at least 99%, or 100% identity to SEQ ID NO:267. In some aspects, VH1 and VH2 comprise the amino acid sequence of SEQ ID NO:271; and VL1 and VL2 comprise the amino acid sequence of SEQ ID NO:267. In some aspects, L1 or L2 and L3 or L4 comprise the amino acid sequence of any one of SEQ ID NOs:1-34, wherein SEQ ID NO:1 has the amino acid sequence of G, SEQ ID NO:2 has the amino acid sequence of A, SEQ ID NO:3 has the amino acid sequence of GSS and SEQ ID NO:4 has the amino acid sequence of ASG. In some aspects, L1 or L2 and L3 or L4 comprise the amino acid sequence of SEQ ID NO:27. In some aspects, L1 or L3 and L5 or L7 comprise the amino acid sequence of any one of SEQ ID NOs:1-34, wherein SEQ ID NO:1 has the amino acid sequence of G, SEQ ID NO:2 has the amino acid sequence of A, SEQ ID NO:3 has the amino acid sequence of GSS and SEQ ID NO:4 has the amino acid sequence of ASG. In some aspects, L1 or L3 and L5 or L7 comprise the amino acid sequence of SEQ ID NO:27. In some aspects, L2 or L4 and L6 or L8 comprise the amino acid sequence of any one of SEQ ID NOs:1-34, wherein SEQ ID NO:1 has the amino acid sequence of G, SEQ ID NO:2 has the amino acid sequence of A, SEQ ID NO:3 has the amino acid sequence of GSS and SEQ ID NO:4 has the amino acid sequence of ASG. In some aspects, L2 or L4 and L6 or L8 comprise the amino acid sequence of SEQ ID NO:12. In some aspects, Fc comprises a knob-into-hole modification or Fc effector function knockout mutation. In some aspects, Fc comprises an amino acid sequence having at least 80%, at least 85%, at least 90%, at least 91%, at least 92%, at least 93%, at least 94%, at least 95%, at least 96%, at least 97%, at least 98%, at least 99%, or 100% identity to SEQ ID NO:37. In some aspects, Fc comprises the amino acid sequence of SEQ ID NO:37. In some preferred aspects, VH1, VH2, VL1 and VL2 have at least 90% identity with the corresponding amino acid sequences specified above, optionally with (i) an Fc having at least 90% identity with the corresponding amino acid sequence recited above; and/or (ii) one or more linker sequence as specified above. In some particularly preferred aspects, VH1, VH2, VL1 and VL2 comprise or consist of the corresponding amino acid sequences specified above, optionally with (i) an Fc comprising or consisting of the corresponding amino acid sequence recited above; and/or (ii) one or more linker sequence as specified above.

[0697] In some aspects, the first polypeptide comprises an amino acid sequence having at least 80%, at least 85%, at least 90%, at least 91%, at least 92%, at least 93%, at least 94%, at least 95%, at least 96%, at least 97%, at least 98%, at least 99%, or 100% identity to SEQ ID NO:331; and the second polypeptide comprises an amino acid sequence having at least 80%, at least 85%, at least 90%, at least 91%, at least 92%, at least 93%, at least 94%, at least 95%, at least 96%, at least 97%, at least 98%, at least 99%, or 100% identity to SEQ ID NO:331. In some aspects, both the first polypeptide and the second polypeptide have at least 90% identity to SEQ ID NO:331. In some aspects, the first polypeptide comprises the amino acid sequence of SEQ ID NO:331; and the second polypeptide comprises the amino acid sequence of SEQ ID NO:331. In some aspects, the first polypeptide comprises an amino acid sequence encoded by a polynucleotide having at least 80%, at least 85%, at least 90%, at least 91%, at least 92%, at least 93%, at least 94%, at least 95%, at least 96%, at least 97%, at least 98%, at least 99%, or 100% identity to SEQ ID NO:332; and the second polypeptide comprises an amino acid sequence encoded by a polynucleotide having at least 80%, at least 85%, at least 90%, at least 91%, at least 92%, at least 93%, at least 94%, at least 95%, at least 96%, at least 97%, at least 98%, at least 99%, or 100% identity to SEQ ID NO:332. In some aspects, both the first polypeptide and the second polypeptide comprise an amino acid sequence encoded by a polynucleotide having at least 90% identity to SEQ ID NO:332. In some aspects, the first polypeptide comprises an amino acid sequence encoded by the polynucleotide of SEQ ID NO:332; and the second polypeptide comprises an amino acid sequence encoded by the polynucleotide of SEQ ID NO:332.

[0698] In some aspects, VH1 and VH2 comprise an amino acid sequence having at least 80%, at least 85%, at least 90%, at least 91%, at least 92%, at least 93%, at least 94%, at least 95%, at least 96%, at least 97%, at least 98%, at least 99%, or 100% identity to SEQ ID NO:279; and VL1 and VL2 comprise an amino acid sequence having at least 80%, at least 85%, at least 90%, at least 91%, at least 92%, at least 93%, at least 94%, at least 95%, at least 96%, at least 97%, at least 98%, at least 99%, or 100% identity to SEQ ID NO:275. In some aspects, VH1 and VH2 comprise the amino acid sequence of SEQ ID NO:279; and VL1 and VL2 comprise the amino acid sequence of SEQ ID NO:275. In some aspects, L1 or L2 and L3 or L4 comprise the amino acid sequence of any one of SEQ ID NOs:1-34, wherein SEQ ID NO:1 has the amino acid sequence of G, SEQ ID NO:2 has the amino acid sequence of A, SEQ ID NO:3 has the amino acid sequence of GSS and SEQ ID NO:4 has the amino acid sequence of ASG. In some aspects, L1 or L2 and L3 or L4 comprise the amino acid sequence of SEQ ID NO:27. In some aspects, L1 or L3 and L5 or L7 comprise the amino acid sequence of any one of SEQ ID NOs:1-34, wherein SEQ ID NO:1 has the amino acid sequence of G, SEQ ID NO:2 has the amino acid sequence of A, SEQ ID NO:3 has the amino acid sequence of GSS and SEQ ID NO:4 has the amino acid sequence of ASG. In some aspects, L1 or L3 and L5 or L7 comprise the amino acid sequence of SEQ ID NO:27. In some aspects, L2 or L4 and L6 or L8 comprise the amino acid sequence of any one of SEQ ID NOs:1-34, wherein SEQ ID NO:1 has the amino acid sequence of G, SEQ ID NO:2 has the amino acid sequence of A, SEQ ID NO:3 has the amino acid sequence of GSS and SEQ ID NO:4 has the amino acid sequence of ASG. In some aspects, L2 or L4 and L6 or L8 comprise the amino acid sequence of SEQ ID NO:12. In some aspects, Fc comprises a knob-into-hole modification or Fc effector function knockout mutation. In some aspects, Fc comprises an amino acid sequence having at least 80%, at least 85%, at least 90%, at least 91%, at least 92%, at least 93%, at least 94%, at least 95%, at least 96%, at least 97%, at least 98%, at least 99%, or 100% identity to SEQ ID NO:37. In some aspects, Fc comprises the amino acid sequence of SEQ ID NO:37. In some aspects, the sequence has a mutation at N62, for example, N62Q or N62Q at, for example, SEQ ID NO:279. In some preferred aspects, VH1, VH2, VL1 and VL2 have at least 90% identity with the corresponding amino acid sequences specified above, optionally with (i) an Fc having at least 90% identity with the corresponding amino acid sequence recited above; and/or (ii) one or more linker sequence as specified above. In some particularly preferred aspects, VH1, VH2, VL1 and VL2 comprise or consist of the corresponding amino acid sequences specified above, optionally with (i) an Fc comprising or consisting of the corresponding amino acid sequence recited above; and/or (ii) one or more linker sequence as specified above.

[0699] In some aspects, the first polypeptide comprises an amino acid sequence having at least 80%, at least 85%, at least 90%, at least 91%, at least 92%, at least 93%, at least 94%, at least 95%, at least 96%, at least 97%, at least 98%, at least 99%, or 100% identity to SEQ ID NO:333; and the second polypeptide comprises an amino acid sequence having at least 80%, at least 85%, at least 90%, at least 91%, at least 92%, at least 93%, at least 94%, at least 95%, at least 96%, at least 97%, at least 98%, at least 99%, or 100% identity to SEQ ID NO:333. In some aspects, both the first polypeptide and the second polypeptide have at least 90% identity to SEQ ID NO:333. In some aspects, the first polypeptide comprises the amino acid sequence of SEQ ID NO:333; and the second polypeptide comprises the amino acid sequence of SEQ ID NO:333. In some aspects, the first polypeptide comprises an amino acid sequence encoded by a polynucleotide having at least 80%, at least 85%, at least 90%, at least 91%, at least 92%, at least 93%, at least 94%, at least 95%, at least 96%, at least 97%, at least 98%, at least 99%, or 100% identity to SEQ ID NO:334; and the second polypeptide comprises an amino acid sequence encoded by a polynucleotide having at least 80%, at least 85%, at least 90%, at least 91%, at least 92%, at least 93%, at least 94%, at least 95%, at least 96%, at least 97%, at least 98%, at least 99%, or 100% identity to SEQ ID NO:334. In some aspects, both the first polypeptide and the second polypeptide comprise an amino acid sequence encoded by a polynucleotide having at least 90% identity to SEQ ID NO:334. In some aspects, the first polypeptide comprises an amino acid sequence encoded by the polynucleotide of SEQ ID NO:334; and the second polypeptide comprises an amino acid sequence encoded by the polynucleotide of SEQ ID NO:334.

[0700] In some aspects, provided herein is an antigen binding polypeptide complex comprising a first polypeptide and a second polypeptide; wherein the first polypeptide has a structure represented by VL1-L1-VL2-L2-VH2-L3-VH1; VL1-L1-VH2-L2-VL2-L3-VH1; VH1-L4-VH2-L5-VL2-L6-VL1; or VH1-L4-VL2-L5-VH2-L6-VL1; wherein the second polypeptide has a structure represented by VL3-L7-VL4-L8-VH4-L9-VH3; VL3-L7-VH4-L8-VL4-L9-VH3; VH3-L10-VH4-L11-VL4-L12-VL3; or VH3-L10-VL4-L11-VH4-L12-VL3; wherein VL1 is a first immunoglobulin light chain variable region that specifically binds to a SARS-CoV-2 protein; VL2 is a second immunoglobulin light chain variable region that specifically binds to a SARS-CoV-2 protein; VL3 is a third immunoglobulin light chain variable region that specifically binds to a SARS-CoV-2 protein; VL4 is a fourth immunoglobulin light chain variable region that specifically binds to a SARS-CoV-2 protein; VH1 is a first immunoglobulin heavy chain variable region that specifically binds to a SARS-CoV-2 protein; VH2 is a second immunoglobulin heavy chain variable region that specifically binds to a SARS-CoV-2 protein; VH3 is a third immunoglobulin heavy chain variable region that specifically binds to a SARS-CoV-2 protein; VH4 is a fourth immunoglobulin heavy chain variable region that specifically binds to a SARS-CoV-2 protein; and L1-L12 are amino acid linkers. In some aspects, provided herein is an antigen binding polypeptide complex comprising a first polypeptide and a second polypeptide; wherein the first polypeptide has a structure represented by VL1-L1-VL2-L2-VH2-L3-VH1-L4-Fc; VL1-L1-VH2-L2-VL2-L3-VH1-L4-Fc; VH1-L5-VH2-L6-VL2-L7-VL1-L8-Fc; or VH1-L5-VL2-L6-VH2-L7-VL1-L8-Fc; wherein the second polypeptide has a structure represented by Fc; VL3-L9-VL4-L10-VH4-L11-VH3-L12-Fc; VL3-L9-VH4-L10-VL4-L11-VH3-L12-Fc; VH3-L13-VH4-L14-VL4-L15-VL3-L16-Fc; or VH3-L13-VL4-L14-VH4-L15-VL3-L16-Fc; wherein VL1 is a first immunoglobulin light chain variable region that specifically binds to a SARS-CoV-2 protein; VL2 is a second immunoglobulin light chain variable region that specifically binds to a SARS-CoV-2 protein; VL3 is a third immunoglobulin light chain variable region that specifically binds to a SARS-CoV-2 protein; VL4 is a fourth immunoglobulin light chain variable region that specifically binds to a SARS-CoV-2 protein; VH1 is a first immunoglobulin heavy chain variable region that specifically binds to a SARS-CoV-2 protein; VH2 is a second immunoglobulin heavy chain variable region that specifically binds to a SARS-CoV-2 protein; VH3 is a third immunoglobulin heavy chain variable region that specifically binds to a SARS-CoV-2 protein; VH4 is a fourth immunoglobulin heavy chain variable region that specifically binds to a SARS-CoV-2 protein; Fc is a region comprising an immunoglobulin heavy chain constant region 2 (CH2), an immunoglobulin heavy chain constant region 3 (CH3), and optionally, an immunoglobulin hinge; and L1-L16 are amino acid linkers. In some aspects, provided herein is an antigen binding polypeptide complex comprising a first polypeptide and a second polypeptide; wherein the first polypeptide has a structure represented by VL1-L1-VL2-L2-VH2-L3-VH1; the second polypeptide has a structure represented by VL3-L7-VL4-L8-VH4-L9-VH3; VL3-L7-VH4-L8-VL4-L9-VH3; VH3-L10-VH4-L11-VL4-L12-VL3; or VH3-L10-VL4-L11-VH4-L12-VL3; and wherein the first and/or second polypeptide may have an Fe as shown above. In some aspects, provided herein is an antigen binding polypeptide complex comprising a first polypeptide and a second polypeptide; wherein the first polypeptide has a structure represented by VL1-L1-VH2-L2-VL2-L3-VH1; the second polypeptide has a structure represented by VL3-L7-VL4-L8-VH4-L9-VH3; VL3-L7-VH4-L8-VL4-L9-VH3; VH3-L10-VH4-L11-VL4-L12-VL3; or VH3-L10-VL4-L11-VH4-L12-VL3; and wherein the first and/or second polypeptide may have an Fc as shown above. In some aspects, provided herein is an antigen binding polypeptide complex comprising a first polypeptide and a second polypeptide; wherein the first polypeptide has a structure represented by VH1-L4-VH2-L5-VL2-L6-VL1; the second polypeptide has a structure represented by VL3-L7-VL4-L8-VH4-L9-VH3; VL3-L7-VH4-L8-VL4-L9-VH3; VH3-L10-VH4-L11-VL4-L12-VL3; or VH3-L10-VL4-L11-VH4-L12-VL3; and wherein the first and/or second polypeptide may have an Fc as shown above. In some aspects, provided herein is an antigen binding polypeptide complex comprising a first polypeptide and a second polypeptide; wherein the first polypeptide has a structure represented by VH1-L4-VL2-L5-VH2-L6-VL1; the second polypeptide has a structure represented by VL3-L7-VL4-L8-VH4-L9-VH3; VL3-L7-VH4-L8-VL4-L9-VH3; VH3-L10-VH4-L11-VL4-L12-VL3; or VH3-L10-VL4-L11-VH4-L12-VL3; and wherein the first and/or second polypeptide may have an Fc as shown above.

[0701] In some aspects, VH1, VH2, VH3 and VH4 comprise an amino acid sequence having at least 80%, at least 85%, at least 90%, at least 91%, at least 92%, at least 93%, at least 94%, at least 95%, at least 96%, at least 97%, at least 98%, at least 99%, or 100% identity to SEQ ID NO:263; and VL1, VL2, VL3 and VL4 comprise an amino acid sequence having at least 80%, at least 85%, at least 90%, at least 91%, at least 92%, at least 93%, at least 94%, at least 95%, at least 96%, at least 97%, at least 98%, at least 99%, or 100% identity to SEQ ID NO:259. In some aspects, VH1, VH2, VH3 and VH4 comprise the amino acid sequence of SEQ ID NO:263; and VL1, VL2, VL3 and VL4 comprise the amino acid sequence of SEQ ID NO:259. In some aspects, L1-L16 comprise the amino acid sequence of any one of SEQ ID NOs:1-34, wherein SEQ ID NO:1 has the amino acid sequence of G, SEQ ID NO:2 has the amino acid sequence of A, SEQ ID NO:3 has the amino acid sequence of GSS and SEQ ID NO:4 has the amino acid sequence of ASG. In some aspects, L1 or L4 and L7 or L10 comprise the amino acid sequence of SEQ ID NO:6; L2 or L5 and L8 or L11 comprise the amino acid sequence of SEQ ID NO:27; and L3 or L6 and L9 or L12 comprise the amino acid sequence of SEQ ID NO:6. In some aspects, L1 or L5 and L9 or L13 comprise the amino acid sequence of SEQ ID NO:6; L2 or L6 and L10 or L14 comprise the amino acid sequence of SEQ ID NO:27; L3 or L7 and L11 or L15 comprise the amino acid sequence of SEQ ID NO:6; and L4 or L8 and L12 or L16 comprise the amino acid sequence of SEQ ID NO:12. In some aspects, Fc comprises a knob-into-hole modification or Fc effector function knockout mutation. In some aspects, Fc comprises an amino acid sequence having at least 80%, at least 85%, at least 90%, at least 91%, at least 92%, at least 93%, at least 94%, at least 95%, at least 96%, at least 97%, at least 98%, at least 99%, or 100% identity to SEQ ID NO:37. In some aspects, Fc comprises the amino acid sequence of SEQ ID NO:37. In some preferred aspects, VH1, VH2, VH3, VH4, VL1, VL2, VL3 and VL4 have at least 90% identity with the corresponding amino acid sequences specified above, optionally with (i) an Fc having at least 90% identity with the corresponding amino acid sequence recited above; and/or (ii) one or more linker sequence as specified above. In some particularly preferred aspects, VH1, VH2, VH3, VH4, VL1, VL2, VL3 and VL4 comprise or consist of the corresponding amino acid sequences specified above, optionally with (i) an Fc comprising or consisting of the corresponding amino acid sequence recited above; and/or (ii) one or more linker sequence as specified above.

[0702] In some aspects, the first polypeptide comprises an amino acid sequence having at least 80%, at least 85%, at least 90%, at least 91%, at least 92%, at least 93%, at least 94%, at least 95%, at least 96%, at least 97%, at least 98%, at least 99%, or 100% identity to SEQ ID NO:291; and the second polypeptide comprises an amino acid sequence having at least 80%, at least 85%, at least 90%, at least 91%, at least 92%, at least 93%, at least 94%, at least 95%, at least 96%, at least 97%, at least 98%, at least 99%, or 100% identity to SEQ ID NO:291. In some aspects, both the first polypeptide and the second polypeptide have at least 90% identity to SEQ ID NO:291. In some aspects, the first polypeptide comprises the amino acid sequence of SEQ ID NO:291; and the second polypeptide comprises the amino acid sequence of SEQ ID NO:291. In some aspects, the first polypeptide comprises an amino acid sequence encoded by a polynucleotide having at least 80%, at least 85%, at least 90%, at least 91%, at least 92%, at least 93%, at least 94%, at least 95%, at least 96%, at least 97%, at least 98%, at least 99%, or 100% identity to SEQ ID NO:292; and the second polypeptide comprises an amino acid sequence encoded by a polynucleotide having at least 80%, at least 85%, at least 90%, at least 91%, at least 92%, at least 93%, at least 94%, at least 95%, at least 96%, at least 97%, at least 98%, at least 99%, or 100% identity to SEQ ID NO:292. In some aspects, both the first polypeptide and the second polypeptide comprise an amino acid sequence encoded by a polynucleotide having at least 90% identity to SEQ ID NO:292. In some aspects, the first polypeptide comprises an amino acid sequence encoded by the polynucleotide of SEQ ID NO:292; and the second polypeptide comprises an amino acid sequence encoded by the polynucleotide of SEQ ID NO:292.

[0703] In some aspects, VH1, VH2, VH3 and VH4 comprise an amino acid sequence having at least 80%, at least 85%, at least 90%, at least 91%, at least 92%, at least 93%, at least 94%, at least 95%, at least 96%, at least 97%, at least 98%, at least 99%, or 100% identity to SEQ ID NO:271; and VL1, VL2, VL3 and VL4 comprise an amino acid sequence having at least 80%, at least 85%, at least 90%, at least 91%, at least 92%, at least 93%, at least 94%, at least 95%, at least 96%, at least 97%, at least 98%, at least 99%, or 100% identity to SEQ ID NO:267. In some aspects, VH1, VH2, VH3 and VH4 comprise the amino acid sequence of SEQ ID NO:271; and VL1, VL2, VL3 and VL4 comprise the amino acid sequence of SEQ ID NO:267. In some aspects, L1-L16 comprise the amino acid sequence of any one of SEQ ID NOs:1-34, wherein SEQ ID NO:1 has the amino acid sequence of G, SEQ ID NO:2 has the amino acid sequence of A, SEQ ID NO:3 has the amino acid sequence of GSS and SEQ ID NO:4 has the amino acid sequence of ASG. In some aspects, L1 or L4 and L7 or L10 comprise the amino acid sequence of SEQ ID NO:6; L2 or L5 and L8 or L11 comprise the amino acid sequence of SEQ ID NO:27; and L3 or L6 and L9 or L12 comprise the amino acid sequence of SEQ ID NO:6. In some aspects, L1 or L5 and L9 or L13 comprise the amino acid sequence of SEQ ID NO:6; L2 or L6 and L10 or L14 comprise the amino acid sequence of SEQ ID NO:27; L3 or L7 and L11 or L15 comprise the amino acid sequence of SEQ ID NO:6; and L4 or L8 and L12 or L16 comprise the amino acid sequence of SEQ ID NO:12. In some aspects, Fc comprises a knob-into-hole modification or Fc effector function knockout mutation. In some aspects, Fc comprises an amino acid sequence having at least 80%, at least 85%, at least 90%, at least 91%, at least 92%, at least 93%, at least 94%, at least 95%, at least 96%, at least 97%, at least 98%, at least 99%, or 100% identity to SEQ ID NO:37. In some aspects, Fc comprises the amino acid sequence of SEQ ID NO:37. In some preferred aspects, VH1, VH2, VH3, VH4, VL1, VL2, VL3 and VL4 have at least 90% identity with the corresponding amino acid sequences specified above, optionally with (i) an Fe having at least 90% identity with the corresponding amino acid sequence recited above; and/or (ii) one or more linker sequence as specified above. In some particularly preferred aspects, VH1, VH2, VH3, VH4, VL1, VL2, VL3 and VL4 comprise or consist of the corresponding amino acid sequences specified above, optionally with (i) an Fc comprising or consisting of the corresponding amino acid sequence recited above; and/or (ii) one or more linker sequence as specified above.

[0704] In some aspects, the first polypeptide comprises an amino acid sequence having at least 80%, at least 85%, at least 90%, at least 91%, at least 92%, at least 93%, at least 94%, at least 95%, at least 96%, at least 97%, at least 98%, at least 99%, or 100% identity to SEQ ID NO:295; and the second polypeptide comprises an amino acid sequence having at least 80%, at least 85%, at least 90%, at least 91%, at least 92%, at least 93%, at least 94%, at least 95%, at least 96%, at least 97%, at least 98%, at least 99%, or 100% identity to SEQ ID NO:295. In some aspects, both the first polypeptide and the second polypeptide have at least 90% identity to SEQ ID NO:295. In some aspects, the first polypeptide comprises the amino acid sequence of SEQ ID NO:295; and the second polypeptide comprises the amino acid sequence of SEQ ID NO:295. In some aspects, the first polypeptide comprises an amino acid sequence encoded by a polynucleotide having at least 80%, at least 85%, at least 90%, at least 91%, at least 92%, at least 93%, at least 94%, at least 95%, at least 96%, at least 97%, at least 98%, at least 99%, or 100% identity to SEQ ID NO:296; and the second polypeptide comprises an amino acid sequence encoded by a polynucleotide having at least 80%, at least 85%, at least 90%, at least 91%, at least 92%, at least 93%, at least 94%, at least 95%, at least 96%, at least 97%, at least 98%, at least 99%, or 100% identity to SEQ ID NO:296. In some aspects, both the first polypeptide and the second polypeptide comprise an amino acid sequence encoded by a polynucleotide having at least 90% identity to SEQ ID NO:296. In some aspects, the first polypeptide comprises an amino acid sequence encoded by the polynucleotide of SEQ ID NO:296; and the second polypeptide comprises an amino acid sequence encoded by the polynucleotide of SEQ ID NO:296.

[0705] In some aspects, VH1, VH2, VH3 and VH4 comprise an amino acid sequence having at least 80%, at least 85%, at least 90%, at least 91%, at least 92%, at least 93%, at least 94%, at least 95%, at least 96%, at least 97%, at least 98%, at least 99%, or 100% identity to SEQ ID NO:279; and VL1, VL2, VL3 and VL4 comprise an amino acid sequence having at least 80%, at least 85%, at least 90%, at least 91%, at least 92%, at least 93%, at least 94%, at least 95%, at least 96%, at least 97%, at least 98%, at least 99%, or 100% identity to SEQ ID NO:275. In some aspects, VH1, VH2, VH3 and VH4 comprise the amino acid sequence of SEQ ID NO:279; and VL1, VL2, VL3 and VL4 comprise the amino acid sequence of SEQ ID NO:275. In some aspects, L1-L16 comprise the amino acid sequence of any one of SEQ ID NOs:1-34, wherein SEQ ID NO:1 has the amino acid sequence of G, SEQ ID NO:2 has the amino acid sequence of A, SEQ ID NO:3 has the amino acid sequence of GSS and SEQ ID NO:4 has the amino acid sequence of ASG. In some aspects, L1 or L4 and L7 or L10 comprise the amino acid sequence of SEQ ID NO:6; L2 or L5 and L8 or L11 comprise the amino acid sequence of SEQ ID NO:27; and L3 or L6 and L9 or L12 comprise the amino acid sequence of SEQ ID NO:6. In some aspects, L1 or L5 and L9 or L13 comprise the amino acid sequence of SEQ ID NO:6; L2 or L6 and L10 or L14 comprise the amino acid sequence of SEQ ID NO:27; L3 or L7 and L11 or L15 comprise the amino acid sequence of SEQ ID NO:6; and L4 or L8 and L12 or L16 comprise the amino acid sequence of SEQ ID NO:12. In some aspects, Fc comprises a knob-into-hole modification or Fc effector function knockout mutation. In some aspects, Fc comprises an amino acid sequence having at least 80%, at least 85%, at least 90%, at least 91%, at least 92%, at least 93%, at least 94%, at least 95%, at least 96%, at least 97%, at least 98%, at least 99%, or 100% identity to SEQ ID NO:37. In some aspects, Fc comprises the amino acid sequence of SEQ ID NO:37. In some aspects, the sequence has a mutation at N62, for example, N62Q or N62Q at, for example, SEQ ID NO:279. In some preferred aspects, VH1, VH2, VH3, VH4, VL1, VL2, VL3 and VL4 have at least 90% identity with the corresponding amino acid sequences specified above, optionally with (i) an Fc having at least 90% identity with the corresponding amino acid sequence recited above; and/or (ii) one or more linker sequence as specified above. In some particularly preferred aspects, VH1, VH2, VH3, VH4, VL1, VL2, VL3 and VL4 comprise or consist of the corresponding amino acid sequences specified above, optionally with (i) an Fc comprising or consisting of the corresponding amino acid sequence recited above; and/or (ii) one or more linker sequence as specified above.

[0706] In some aspects, the first polypeptide comprises an amino acid sequence having at least 80%, at least 85%, at least 90%, at least 91%, at least 92%, at least 93%, at least 94%, at least 95%, at least 96%, at least 97%, at least 98%, at least 99%, or 100% identity to SEQ ID NO:297; and the second polypeptide comprises an amino acid sequence having at least 80%, at least 85%, at least 90%, at least 91%, at least 92%, at least 93%, at least 94%, at least 95%, at least 96%, at least 97%, at least 98%, at least 99%, or 100% identity to SEQ ID NO:297. In some aspects, both the first polypeptide and the second polypeptide have at least 90% identity to SEQ ID NO:297. In some aspects, the first polypeptide comprises the amino acid sequence of SEQ ID NO:297; and the second polypeptide comprises the amino acid sequence of SEQ ID NO:297. In some aspects, the first polypeptide comprises an amino acid sequence encoded by a polynucleotide having at least 80%, at least 85%, at least 90%, at least 91%, at least 92%, at least 93%, at least 94%, at least 95%, at least 96%, at least 97%, at least 98%, at least 99%, or 100% identity to SEQ ID NO:298; and the second polypeptide comprises an amino acid sequence encoded by a polynucleotide having at least 80%, at least 85%, at least 90%, at least 91%, at least 92%, at least 93%, at least 94%, at least 95%, at least 96%, at least 97%, at least 98%, at least 99%, or 100% identity to SEQ ID NO:298. In some aspects, both the first polypeptide and the second polypeptide comprise an amino acid sequence encoded by a polynucleotide having at least 90% identity to SEQ ID NO:298. In some aspects, the first polypeptide comprises an amino acid sequence encoded by the polynucleotide of SEQ ID NO:298; and the second polypeptide comprises an amino acid sequence encoded by the polynucleotide of SEQ ID NO:298.

[0707] In some aspects, VH1 and VH3 comprise an amino acid sequence having at least 80%, at least 85%, at least 90%, at least 91%, at least 92%, at least 93%, at least 94%, at least 95%, at least 96%, at least 97%, at least 98%, at least 99%, or 100% identity to SEQ ID NO:58; VH2 and VH4 comprise an amino acid sequence having at least 80%, at least 85%, at least 90%, at least 91%, at least 92%, at least 93%, at least 94%, at least 95%, at least 96%, at least 97%, at least 98%, at least 99%, or 100% identity to SEQ ID NO:263; VL1 and VL3 comprise an amino acid sequence having at least 80%, at least 85%, at least 90%, at least 91%, at least 92%, at least 93%, at least 94%, at least 95%, at least 96%, at least 97%, at least 98%, at least 99%, or 100% identity to SEQ ID NO:54; and VL2 and VL4 comprise an amino acid sequence having at least 80%, at least 85%, at least 90%, at least 91%, at least 92%, at least 93%, at least 94%, at least 95%, at least 96%, at least 97%, at least 98%, at least 99%, or 100% identity to SEQ ID NO:259. In some aspects, VH1 and VH3 comprise the amino acid sequence of SEQ ID NO:58; VH2 and VH4 comprise the amino acid sequence of SEQ ID NO:263; VL1 and VL3 comprise the amino acid sequence of SEQ ID NO:54; and VL2 and VL4 comprise the amino acid sequence of SEQ ID NO:259. In some aspects, L1-L16 comprise the amino acid sequence of any one of SEQ ID NOs:1-34, wherein SEQ ID NO:1 has the amino acid sequence of G, SEQ ID NO:2 has the amino acid sequence of A, SEQ ID NO:3 has the amino acid sequence of GSS and SEQ ID NO:4 has the amino acid sequence of ASG. In some aspects, L1 or L4 and L7 or L10 comprise the amino acid sequence of SEQ ID NO:6; L2 or L5 and L8 or L11 comprise the amino acid sequence of SEQ ID NO:27; and L3 or L6 and L9 or L12 comprise the amino acid sequence of SEQ ID NO:6. In some aspects, L1 or L5 and L9 or L13 comprise the amino acid sequence of SEQ ID NO:6; L2 or L6 and L10 or L14 comprise the amino acid sequence of SEQ ID NO:27; L3 or L7 and L11 or L15 comprise the amino acid sequence of SEQ ID NO:6; and L4 or L8 and L12 or L16 comprise the amino acid sequence of SEQ ID NO:12. In some aspects, Fc comprises a knob-into-hole modification or Fc effector function knockout mutation. In some aspects, Fc comprises an amino acid sequence having at least 80%, at least 85%, at least 90%, at least 91%, at least 92%, at least 93%, at least 94%, at least 95%, at least 96%, at least 97%, at least 98%, at least 99%, or 100% identity to SEQ ID NO:37. In some aspects, Fc comprises the amino acid sequence of SEQ ID NO:37. In some preferred aspects, VH1, VH2, VH3, VH4, VL1, VL2, VL3 and VL4 have at least 90% identity with the corresponding amino acid sequences specified above, optionally with (i) an Fc having at least 90% identity with the corresponding amino acid sequence recited above; and/or (ii) one or more linker sequence as specified above. In some particularly preferred aspects, VH1, VH2, VH3, VH4, VL1, VL2, VL3 and VL4 comprise or consist of the corresponding amino acid sequences specified above, optionally with (i) an Fc comprising or consisting of the corresponding amino acid sequence recited above; and/or (ii) one or more linker sequence as specified above.

[0708] In some aspects, the first polypeptide comprises an amino acid sequence having at least 80%, at least 85%, at least 90%, at least 91%, at least 92%, at least 93%, at least 94%, at least 95%, at least 96%, at least 97%, at least 98%, at least 99%, or 100% identity to SEQ ID NO:299; and the second polypeptide comprises an amino acid sequence having at least 80%, at least 85%, at least 90%, at least 91%, at least 92%, at least 93%, at least 94%, at least 95%, at least 96%, at least 97%, at least 98%, at least 99%, or 100% identity to SEQ ID NO:299. In some aspects, both the first polypeptide and the second polypeptide have at least 90% identity to SEQ ID NO:299. In some aspects, the first polypeptide comprises the amino acid sequence of SEQ ID NO:299; and the second polypeptide comprises the amino acid sequence of SEQ ID NO:299. In some aspects, the first polypeptide comprises an amino acid sequence encoded by a polynucleotide having at least 80%, at least 85%, at least 90%, at least 91%, at least 92%, at least 93%, at least 94%, at least 95%, at least 96%, at least 97%, at least 98%, at least 99%, or 100% identity to SEQ ID NO:300; and the second polypeptide comprises an amino acid sequence encoded by a polynucleotide having at least 80%, at least 85%, at least 90%, at least 91%, at least 92%, at least 93%, at least 94%, at least 95%, at least 96%, at least 97%, at least 98%, at least 99%, or 100% identity to SEQ ID NO:300. In some aspects, both the first polypeptide and the second polypeptide comprise an amino acid sequence encoded by a polynucleotide having at least 90% identity to SEQ ID NO:300. In some aspects, the first polypeptide comprises an amino acid sequence encoded by the polynucleotide of SEQ ID NO:300; and the second polypeptide comprises an amino acid sequence encoded by the polynucleotide of SEQ ID NO:300.

[0709] In some aspects, VH1 and VH3 comprise an amino acid sequence having at least 80%, at least 85%, at least 90%, at least 91%, at least 92%, at least 93%, at least 94%, at least 95%, at least 96%, at least 97%, at least 98%, at least 99%, or 100% identity to SEQ ID NO:279; VH2 and VH4 comprise an amino acid sequence having at least 80%, at least 85%, at least 90%, at least 91%, at least 92%, at least 93%, at least 94%, at least 95%, at least 96%, at least 97%, at least 98%, at least 99%, or 100% identity to SEQ ID NO:263; VL1 and VL3 comprise an amino acid sequence having at least 80%, at least 85%, at least 90%, at least 91%, at least 92%, at least 93%, at least 94%, at least 95%, at least 96%, at least 97%, at least 98%, at least 99%, or 100% identity to SEQ ID NO:275; and VL2 and VL4 comprise an amino acid sequence having at least 80%, at least 85%, at least 90%, at least 91%, at least 92%, at least 93%, at least 94%, at least 95%, at least 96%, at least 97%, at least 98%, at least 99%, or 100% identity to SEQ ID NO:259. In some aspects, VH1 and VH3 comprise the amino acid sequence of SEQ ID NO:279; VH2 and VH4 comprise the amino acid sequence of SEQ ID NO:263; VL1 and VL3 comprise the amino acid sequence of SEQ ID NO:275; and VL2 and VL4 comprise the amino acid sequence of SEQ ID NO:259. In some aspects, L1-L16 comprise the amino acid sequence of any one of SEQ ID NOs:1-34, wherein SEQ ID NO:1 has the amino acid sequence of G, SEQ ID NO:2 has the amino acid sequence of A, SEQ ID NO:3 has the amino acid sequence of GSS and SEQ ID NO:4 has the amino acid sequence of ASG. In some aspects, L1 or L4 and L7 or L10 comprise the amino acid sequence of SEQ ID NO:6; L2 or L5 and L8 or L11 comprise the amino acid sequence of SEQ ID NO:27; and L3 or L6 and L9 or L12 comprise the amino acid sequence of SEQ ID NO:6. In some aspects, L1 or L5 and L9 or L13 comprise the amino acid sequence of SEQ ID NO:6; L2 or L6 and L10 or L14 comprise the amino acid sequence of SEQ ID NO:27; L3 or L7 and L11 or L15 comprise the amino acid sequence of SEQ ID NO:6; and L4 or L8 and L12 or L16 comprise the amino acid sequence of SEQ ID NO:12. In some aspects, Fc comprises a knob-into-hole modification or Fc effector function knockout mutation. In some aspects, Fc comprises an amino acid sequence having at least 80%, at least 85%, at least 90%, at least 91%, at least 92%, at least 93%, at least 94%, at least 95%, at least 96%, at least 97%, at least 98%, at least 99%, or 100% identity to SEQ ID NO:37. In some aspects, Fc comprises the amino acid sequence of SEQ ID NO:37. In some aspects, the sequence has a mutation at N62, for example, N62Q or N62Q at, for example, SEQ ID NO:279. In some preferred aspects, VH1, VH2, VH3, VH4, VL1, VL2, VL3 and VL4 have at least 90% identity with the corresponding amino acid sequences specified above, optionally with (i) an Fc having at least 90% identity with the corresponding amino acid sequence recited above; and/or (ii) one or more linker sequence as specified above. In some particularly preferred aspects, VH1, VH2, VH3, VH4, VL1, VL2, VL3 and VL4 comprise or consist of the corresponding amino acid sequences specified above, optionally with (i) an Fc comprising or consisting of the corresponding amino acid sequence recited above; and/or (ii) one or more linker sequence as specified above.

[0710] In some aspects, the first polypeptide comprises an amino acid sequence having at least 80%, at least 85%, at least 90%, at least 91%, at least 92%, at least 93%, at least 94%, at least 95%, at least 96%, at least 97%, at least 98%, at least 99%, or 100% identity to SEQ ID NO:301; and the second polypeptide comprises an amino acid sequence having at least 80%, at least 85%, at least 90%, at least 91%, at least 92%, at least 93%, at least 94%, at least 95%, at least 96%, at least 97%, at least 98%, at least 99%, or 100% identity to SEQ ID NO:301. In some aspects, both the first polypeptide and the second polypeptide have at least 90% identity to SEQ ID NO:301. In some aspects, the first polypeptide comprises the amino acid sequence of SEQ ID NO:301; and the second polypeptide comprises the amino acid sequence of SEQ ID NO:301. In some aspects, the first polypeptide comprises an amino acid sequence encoded by a polynucleotide having at least 80%, at least 85%, at least 90%, at least 91%, at least 92%, at least 93%, at least 94%, at least 95%, at least 96%, at least 97%, at least 98%, at least 99%, or 100% identity to SEQ ID NO:302; and the second polypeptide comprises an amino acid sequence encoded by a polynucleotide having at least 80%, at least 85%, at least 90%, at least 91%, at least 92%, at least 93%, at least 94%, at least 95%, at least 96%, at least 97%, at least 98%, at least 99%, or 100% identity to SEQ ID NO:302. In some aspects, both the first polypeptide and the second polypeptide comprise an amino acid sequence encoded by a polynucleotide having at least 90% identity to SEQ ID NO:302. In some aspects, the first polypeptide comprises an amino acid sequence encoded by the polynucleotide of SEQ ID NO:302; and the second polypeptide comprises an amino acid sequence encoded by the polynucleotide of SEQ ID NO:302.

[0711] In some aspects, VH1 and VH3 comprise an amino acid sequence having at least 80%, at least 85%, at least 90%, at least 91%, at least 92%, at least 93%, at least 94%, at least 95%, at least 96%, at least 97%, at least 98%, at least 99%, or 100% identity to SEQ ID NO:263; VH2 and VH4 comprise an amino acid sequence having at least 80%, at least 85%, at least 90%, at least 91%, at least 92%, at least 93%, at least 94%, at least 95%, at least 96%, at least 97%, at least 98%, at least 99%, or 100% identity to SEQ ID NO:58; VL1 and VL3 comprise an amino acid sequence having at least 80%, at least 85%, at least 90%, at least 91%, at least 92%, at least 93%, at least 94%, at least 95%, at least 96%, at least 97%, at least 98%, at least 99%, or 100% identity to SEQ ID NO:259; and VL2 and VL4 comprise an amino acid sequence having at least 80%, at least 85%, at least 90%, at least 91%, at least 92%, at least 93%, at least 94%, at least 95%, at least 96%, at least 97%, at least 98%, at least 99%, or 100% identity to SEQ ID NO:54. In some aspects, VH1 and VH3 comprise the amino acid sequence of SEQ ID NO:263; VH2 and VH4 comprise the amino acid sequence of SEQ ID NO:58; VL1 and VL3 comprise the amino acid sequence of SEQ ID NO:259; and VL2 and VL4 comprise the amino acid sequence of SEQ ID NO:54. In some aspects, L1-L16 comprise the amino acid sequence of any one of SEQ ID NOs:1-34, wherein SEQ ID NO:1 has the amino acid sequence of G, SEQ ID NO:2 has the amino acid sequence of A, SEQ ID NO:3 has the amino acid sequence of GSS and SEQ ID NO:4 has the amino acid sequence of ASG. In some aspects, L1 or L4 and L7 or L10 comprise the amino acid sequence of SEQ ID NO:6; L2 or L5 and L8 or L11 comprise the amino acid sequence of SEQ ID NO:27; and L3 or L6 and L9 or L12 comprise the amino acid sequence of SEQ ID NO:6. In some aspects, L1 or L5 and L9 or L13 comprise the amino acid sequence of SEQ ID NO:6; L2 or L6 and L10 or L14 comprise the amino acid sequence of SEQ ID NO:27; L3 or L7 and L11 or L15 comprise the amino acid sequence of SEQ ID NO:6; and L4 or L8 and L12 or L16 comprise the amino acid sequence of SEQ ID NO:12. In some aspects, Fc comprises a knob-into-hole modification or Fc effector function knockout mutation. In some aspects, Fc comprises an amino acid sequence having at least 80%, at least 85%, at least 90%, at least 91%, at least 92%, at least 93%, at least 94%, at least 95%, at least 96%, at least 97%, at least 98%, at least 99%, or 100% identity to SEQ ID NO:37. In some aspects, Fc comprises the amino acid sequence of SEQ ID NO:37. In some preferred aspects, VH1, VH2, VH3, VH4, VL1, VL2, VL3 and VL4 have at least 90% identity with the corresponding amino acid sequences specified above, optionally with (i) an Fc having at least 90% identity with the corresponding amino acid sequence recited above; and/or (ii) one or more linker sequence as specified above. In some particularly preferred aspects, VH1, VH2, VH3, VH4, VL1, VL2, VL3 and VL4 comprise or consist of the corresponding amino acid sequences specified above, optionally with (i) an Fc comprising or consisting of the corresponding amino acid sequence recited above; and/or (ii) one or more linker sequence as specified above.

[0712] In some aspects, the first polypeptide comprises an amino acid sequence having at least 80%, at least 85%, at least 90%, at least 91%, at least 92%, at least 93%, at least 94%, at least 95%, at least 96%, at least 97%, at least 98%, at least 99%, or 100% identity to SEQ ID NO:303; and the second polypeptide comprises an amino acid sequence having at least 80%, at least 85%, at least 90%, at least 91%, at least 92%, at least 93%, at least 94%, at least 95%, at least 96%, at least 97%, at least 98%, at least 99%, or 100% identity to SEQ ID NO:303. In some aspects, both the first polypeptide and the second polypeptide have at least 90% identity to SEQ ID NO:303. In some aspects, the first polypeptide comprises the amino acid sequence of SEQ ID NO:303; and the second polypeptide comprises the amino acid sequence of SEQ ID NO:303. In some aspects, the first polypeptide comprises an amino acid sequence encoded by a polynucleotide having at least 80%, at least 85%, at least 90%, at least 91%, at least 92%, at least 93%, at least 94%, at least 95%, at least 96%, at least 97%, at least 98%, at least 99%, or 100% identity to SEQ ID NO:304; and the second polypeptide comprises an amino acid sequence encoded by a polynucleotide having at least 80%, at least 85%, at least 90%, at least 91%, at least 92%, at least 93%, at least 94%, at least 95%, at least 96%, at least 97%, at least 98%, at least 99%, or 100% identity to SEQ ID NO:304. In some aspects, both the first polypeptide and the second polypeptide comprise an amino acid sequence encoded by a polynucleotide having at least 90% identity to SEQ ID NO:304. In some aspects, the first polypeptide comprises an amino acid sequence encoded by the polynucleotide of SEQ ID NO:304; and the second polypeptide comprises an amino acid sequence encoded by the polynucleotide of SEQ ID NO:304.

[0713] In some aspects, VH1 and VH3 comprise an amino acid sequence having at least 80%, at least 85%, at least 90%, at least 91%, at least 92%, at least 93%, at least 94%, at least 95%, at least 96%, at least 97%, at least 98%, at least 99%, or 100% identity to SEQ ID NO:263; VH2 and VH4 comprise an amino acid sequence having at least 80%, at least 85%, at least 90%, at least 91%, at least 92%, at least 93%, at least 94%, at least 95%, at least 96%, at least 97%, at least 98%, at least 99%, or 100% identity to SEQ ID NO:279; VL1 and VL3 comprise an amino acid sequence having at least 80%, at least 85%, at least 90%, at least 91%, at least 92%, at least 93%, at least 94%, at least 95%, at least 96%, at least 97%, at least 98%, at least 99%, or 100% identity to SEQ ID NO:259; and VL2 and VL4 comprise an amino acid sequence having at least 80%, at least 85%, at least 90%, at least 91%, at least 92%, at least 93%, at least 94%, at least 95%, at least 96%, at least 97%, at least 98%, at least 99%, or 100% identity to SEQ ID NO:275. In some aspects, VH1 and VH3 comprise the amino acid sequence of SEQ ID NO:263; VH2 and VH4 comprise the amino acid sequence of SEQ ID NO:279; VL1 and VL3 comprise the amino acid sequence of SEQ ID NO:259; and VL2 and VL4 comprise the amino acid sequence of SEQ ID NO:275. In some aspects, L1-L16 comprise the amino acid sequence of any one of SEQ ID NOs:1-34, wherein SEQ ID NO:1 has the amino acid sequence of G, SEQ ID NO:2 has the amino acid sequence of A, SEQ ID NO:3 has the amino acid sequence of GSS and SEQ ID NO:4 has the amino acid sequence of ASG. In some aspects, L1 or L4 and L7 or L10 comprise the amino acid sequence of SEQ ID NO:6; L2 or L5 and L8 or L11 comprise the amino acid sequence of SEQ ID NO: 27; and L3 or L6 and L9 or L12 comprise the amino acid sequence of SEQ ID NO:6. In some aspects, L1 or L5 and L9 or L13 comprise the amino acid sequence of SEQ ID NO:6; L2 or L6 and L10 or L14 comprise the amino acid sequence of SEQ ID NO:27; L3 or L7 and L11 or L15 comprise the amino acid sequence of SEQ ID NO:6; and L4 or L8 and L12 or L16 comprise the amino acid sequence of SEQ ID NO:12. In some aspects, Fc comprises a knob-into-hole modification or Fc effector function knockout mutation. In some aspects, Fc comprises an amino acid sequence having at least 80%, at least 85%, at least 90%, at least 91%, at least 92%, at least 93%, at least 94%, at least 95%, at least 96%, at least 97%, at least 98%, at least 99%, or 100% identity to SEQ ID NO:37. In some aspects, Fc comprises the amino acid sequence of SEQ ID NO:37. In some aspects, the sequence has a mutation at N62, for example, N62Q or N62Q at, for example, SEQ ID NO:279. In some preferred aspects, VH1, VH2, VH3, VH4, VL1, VL2, VL3 and VL4 have at least 90% identity with the corresponding amino acid sequences specified above, optionally with (i) an Fc having at least 90% identity with the corresponding amino acid sequence recited above; and/or (ii) one or more linker sequence as specified above. In some particularly preferred aspects, VH1, VH2, VH3, VH4, VL1, VL2, VL3 and VL4 comprise or consist of the corresponding amino acid sequences specified above, optionally with (i) an Fc comprising or consisting of the corresponding amino acid sequence recited above; and/or (ii) one or more linker sequence as specified above.

[0714] In some aspects, the first polypeptide comprises an amino acid sequence having at least 80%, at least 85%, at least 90%, at least 91%, at least 92%, at least 93%, at least 94%, at least 95%, at least 96%, at least 97%, at least 98%, at least 99%, or 100% identity to SEQ ID NO:305; and the second polypeptide comprises an amino acid sequence having at least 80%, at least 85%, at least 90%, at least 91%, at least 92%, at least 93%, at least 94%, at least 95%, at least 96%, at least 97%, at least 98%, at least 99%, or 100% identity to SEQ ID NO:305. In some aspects, both the first polypeptide and the second polypeptide have at least 90% identity to SEQ ID NO:305. In some aspects, the first polypeptide comprises the amino acid sequence of SEQ ID NO:305; and the second polypeptide comprises the amino acid sequence of SEQ ID NO:305. In some aspects, the first polypeptide comprises an amino acid sequence encoded by a polynucleotide having at least 80%, at least 85%, at least 90%, at least 91%, at least 92%, at least 93%, at least 94%, at least 95%, at least 96%, at least 97%, at least 98%, at least 99%, or 100% identity to SEQ ID NO:306; and the second polypeptide comprises an amino acid sequence encoded by a polynucleotide having at least 80%, at least 85%, at least 90%, at least 91%, at least 92%, at least 93%, at least 94%, at least 95%, at least 96%, at least 97%, at least 98%, at least 99%, or 100% identity to SEQ ID NO:306. In some aspects, both the first polypeptide and the second polypeptide comprise an amino acid sequence encoded by a polynucleotide having at least 90% identity to SEQ ID NO:306. In some aspects, the first polypeptide comprises an amino acid sequence encoded by the polynucleotide of SEQ ID NO:306; and the second polypeptide comprises an amino acid sequence encoded by the polynucleotide of SEQ ID NO:306.

[0715] In some aspects, VH1 and VH4 comprise an amino acid sequence having at least 80%, at least 85%, at least 90%, at least 91%, at least 92%, at least 93%, at least 94%, at least 95%, at least 96%, at least 97%, at least 98%, at least 99%, or 100% identity to SEQ ID NO:263; VH2 and VH3 comprise an amino acid sequence having at least 80%, at least 85%, at least 90%, at least 91%, at least 92%, at least 93%, at least 94%, at least 95%, at least 96%, at least 97%, at least 98%, at least 99%, or 100% identity to SEQ ID NO:58; VL1 and VL4 comprise an amino acid sequence having at least 80%, at least 85%, at least 90%, at least 91%, at least 92%, at least 93%, at least 94%, at least 95%, at least 96%, at least 97%, at least 98%, at least 99%, or 100% identity to SEQ ID NO:259; and VL2 and VL3 comprise an amino acid sequence having at least 80%, at least 85%, at least 90%, at least 91%, at least 92%, at least 93%, at least 94%, at least 95%, at least 96%, at least 97%, at least 98%, at least 99%, or 100% identity to SEQ ID NO:54. In some aspects, VH1 and VH4 comprise the amino acid sequence of SEQ ID NO:263; VH2 and VH3 comprise the amino acid sequence of SEQ ID NO:58; VL1 and VL4 comprise the amino acid sequence of SEQ ID NO:259; and VL2 and VL3 comprise the amino acid sequence of SEQ ID NO:54. In some aspects, L1-L16 comprise the amino acid sequence of any one of SEQ ID NOs:1-34, wherein SEQ ID NO:1 has the amino acid sequence of G, SEQ ID NO:2 has the amino acid sequence of A, SEQ ID NO:3 has the amino acid sequence of GSS and SEQ ID NO:4 has the amino acid sequence of ASG. In some aspects, L1 or L4 and L7 or L10 comprise the amino acid sequence of SEQ ID NO:6; L2 or L5 and L8 or L11 comprise the amino acid sequence of SEQ ID NO: 27; and L3 or L6 and L9 or L12 comprise the amino acid sequence of SEQ ID NO:6. In some aspects, L1 or L5 and L9 or L13 comprise the amino acid sequence of SEQ ID NO:6; L2 or L6 and L10 or L14 comprise the amino acid sequence of SEQ ID NO:27; L3 or L7 and L11 or L15 comprise the amino acid sequence of SEQ ID NO:6; and L4 or L8 and L12 or L16 comprise the amino acid sequence of SEQ ID NO:12. In some aspects, Fc comprises a knob-into-hole modification or Fc effector function knockout mutation. In some aspects, Fc comprises an amino acid sequence having at least 80%, at least 85%, at least 90%, at least 91%, at least 92%, at least 93%, at least 94%, at least 95%, at least 96%, at least 97%, at least 98%, at least 99%, or 100% identity to SEQ ID NO:293 or 294. In some aspects, Fc comprises the amino acid sequence of SEQ ID NO:293 or 294. In some preferred aspects, VH1, VH2, VH3, VH4, VL1, VL2, VL3 and VL4 have at least 90% identity with the corresponding amino acid sequences specified above, optionally with (i) an Fc having at least 90% identity with the corresponding amino acid sequence recited above; and/or (ii) one or more linker sequence as specified above. In some particularly preferred aspects, VH1, VH2, VH3, VH4, VL1, VL2, VL3 and VL4 comprise or consist of the corresponding amino acid sequences specified above, optionally with (i) an Fc comprising or consisting of the corresponding amino acid sequence recited above; and/or (ii) one or more linker sequence as specified above.

[0716] In some aspects, the first polypeptide comprises an amino acid sequence having at least 80%, at least 85%, at least 90%, at least 91%, at least 92%, at least 93%, at least 94%, at least 95%, at least 96%, at least 97%, at least 98%, at least 99%, or 100% identity to SEQ ID NO:307; and the second polypeptide comprises an amino acid sequence having at least 80%, at least 85%, at least 90%, at least 91%, at least 92%, at least 93%, at least 94%, at least 95%, at least 96%, at least 97%, at least 98%, at least 99%, or 100% identity to SEQ ID NO:309. In some aspects, the first polypeptide has at least 90% identity to SEQ ID NO:307 and the second polypeptide has at least 90% identity to SEQ ID NO:309. In some aspects, the first polypeptide comprises the amino acid sequence of SEQ ID NO:307; and the second polypeptide comprises the amino acid sequence of SEQ ID NO:309. In some aspects, the first polypeptide comprises an amino acid sequence encoded by a polynucleotide having at least 80%, at least 85%, at least 90%, at least 91%, at least 92%, at least 93%, at least 94%, at least 95%, at least 96%, at least 97%, at least 98%, at least 99%, or 100% identity to SEQ ID NO:308; and the second polypeptide comprises an amino acid sequence encoded by a polynucleotide having at least 80%, at least 85%, at least 90%, at least 91%, at least 92%, at least 93%, at least 94%, at least 95%, at least 96%, at least 97%, at least 98%, at least 99%, or 100% identity to SEQ ID NO:310. In some aspects, the first polypeptide comprises an amino acid sequence encoded by a polynucleotide having at least 90% identity to SEQ ID NO:308 and the second polypeptide comprises an amino acid sequence encoded by a polynucleotide having at least 90% identity to SEQ ID NO:310. In some aspects, the first polypeptide comprises an amino acid sequence encoded by the polynucleotide of SEQ ID NO:308; and the second polypeptide comprises an amino acid sequence encoded by the polynucleotide of SEQ ID NO:310.

[0717] In some aspects, VH1 and VH4 comprise an amino acid sequence having at least 80%, at least 85%, at least 90%, at least 91%, at least 92%, at least 93%, at least 94%, at least 95%, at least 96%, at least 97%, at least 98%, at least 99%, or 100% identity to SEQ ID NO:263; VH2 and VH3 comprise an amino acid sequence having at least 80%, at least 85%, at least 90%, at least 91%, at least 92%, at least 93%, at least 94%, at least 95%, at least 96%, at least 97%, at least 98%, at least 99%, or 100% identity to SEQ ID NO:279; VL1 and VL4 comprise an amino acid sequence having at least 80%, at least 85%, at least 90%, at least 91%, at least 92%, at least 93%, at least 94%, at least 95%, at least 96%, at least 97%, at least 98%, at least 99%, or 100% identity to SEQ ID NO:259; and VL2 and VL3 comprise an amino acid sequence having at least 80%, at least 85%, at least 90%, at least 91%, at least 92%, at least 93%, at least 94%, at least 95%, at least 96%, at least 97%, at least 98%, at least 99%, or 100% identity to SEQ ID NO:275. In some aspects, VH1 and VH4 comprise the amino acid sequence of SEQ ID NO:263; VH2 and VH3 comprise the amino acid sequence of SEQ ID NO:279; VL1 and VL4 comprise the amino acid sequence of SEQ ID NO:259; and VL2 and VL3 comprise the amino acid sequence of SEQ ID NO:275. In some aspects, L1-L16 comprise the amino acid sequence of any one of SEQ ID NOs:1-34, wherein SEQ ID NO:1 has the amino acid sequence of G, SEQ ID NO:2 has the amino acid sequence of A, SEQ ID NO:3 has the amino acid sequence of GSS and SEQ ID NO:4 has the amino acid sequence of ASG. In some aspects, L1 or L4 and L7 or L10 comprise the amino acid sequence of SEQ ID NO:6; L2 or L5 and L8 or L11 comprise the amino acid sequence of SEQ ID NO:27; and L3 or L6 and L9 or L12 comprise the amino acid sequence of SEQ ID NO:6. In some aspects, L1 or L5 and L9 or L13 comprise the amino acid sequence of SEQ ID NO:6; L2 or L6 and L10 or L14 comprise the amino acid sequence of SEQ ID NO:27; L3 or L7 and L11 or L15 comprise the amino acid sequence of SEQ ID NO:6; and L4 or L8 and L12 or L16 comprise the amino acid sequence of SEQ ID NO:12. In some aspects, Fc comprises a knob-into-hole modification or Fc effector function knockout mutation. In some aspects, Fc comprises an amino acid sequence having at least 80%, at least 85%, at least 90%, at least 91%, at least 92%, at least 93%, at least 94%, at least 95%, at least 96%, at least 97%, at least 98%, at least 99%, or 100% identity to SEQ ID NO:293 or 294. In some aspects, Fc comprises the amino acid sequence of SEQ ID NO:293 or 294. In some aspects, the sequence has a mutation at N62, for example, N62Q or N62Q at, for example, SEQ ID NO:279. In some preferred aspects, VH1, VH2, VH3, VH4, VL1, VL2, VL3 and VL4 have at least 90% identity with the corresponding amino acid sequences specified above, optionally with (i) an Fc having at least 90% identity with the corresponding amino acid sequence recited above; and/or (ii) one or more linker sequence as specified above. In some particularly preferred aspects, VH1, VH2, VH3, VH4, VL1, VL2, VL3 and VL4 comprise or consist of the corresponding amino acid sequences specified above, optionally with (i) an Fc comprising or consisting of the corresponding amino acid sequence recited above; and/or (ii) one or more linker sequence as specified above.

[0718] In some aspects, the first polypeptide comprises an amino acid sequence having at least 80%, at least 85%, at least 90%, at least 91%, at least 92%, at least 93%, at least 94%, at least 95%, at least 96%, at least 97%, at least 98%, at least 99%, or 100% identity to SEQ ID NO:311; and the second polypeptide comprises an amino acid sequence having at least 80%, at least 85%, at least 90%, at least 91%, at least 92%, at least 93%, at least 94%, at least 95%, at least 96%, at least 97%, at least 98%, at least 99%, or 100% identity to SEQ ID NO:313. In some aspects, the first polypeptide has at least 90% identity to SEQ ID NO:311 and the second polypeptide has at least 90% identity to SEQ ID NO:313. In some aspects, the first polypeptide comprises the amino acid sequence of SEQ ID NO:311; and the second polypeptide comprises the amino acid sequence of SEQ ID NO:313. In some aspects, the first polypeptide comprises an amino acid sequence encoded by a polynucleotide having at least 80%, at least 85%, at least 90%, at least 91%, at least 92%, at least 93%, at least 94%, at least 95%, at least 96%, at least 97%, at least 98%, at least 99%, or 100% identity to SEQ ID NO:312; and the second polypeptide comprises an amino acid sequence encoded by a polynucleotide having at least 80%, at least 85%, at least 90%, at least 91%, at least 92%, at least 93%, at least 94%, at least 95%, at least 96%, at least 97%, at least 98%, at least 99%, or 100% identity to SEQ ID NO:314. In some aspects, the first polypeptide comprises an amino acid sequence encoded by a polynucleotide having at least 90% identity to SEQ ID NO:312 and the second polypeptide comprises an amino acid sequence encoded by a polynucleotide having at least 90% identity to SEQ ID NO:314. In some aspects, the first polypeptide comprises an amino acid sequence encoded by the polynucleotide of SEQ ID NO:312; and the second polypeptide comprises an amino acid sequence encoded by the polynucleotide of SEQ ID NO:314.

[0719] In some aspects, VH1 and VH3 comprise an amino acid sequence having at least 80%, at least 85%, at least 90%, at least 91%, at least 92%, at least 93%, at least 94%, at least 95%, at least 96%, at least 97%, at least 98%, at least 99%, or 100% identity to SEQ ID NO:58; VH2 and VH4 comprise an amino acid sequence having at least 80%, at least 85%, at least 90%, at least 91%, at least 92%, at least 93%, at least 94%, at least 95%, at least 96%, at least 97%, at least 98%, at least 99%, or 100% identity to SEQ ID NO:271; VL1 and VL3 comprise an amino acid sequence having at least 80%, at least 85%, at least 90%, at least 91%, at least 92%, at least 93%, at least 94%, at least 95%, at least 96%, at least 97%, at least 98%, at least 99%, or 100% identity to SEQ ID NO:54; and VL2 and VL4 comprise an amino acid sequence having at least 80%, at least 85%, at least 90%, at least 91%, at least 92%, at least 93%, at least 94%, at least 95%, at least 96%, at least 97%, at least 98%, at least 99%, or 100% identity to SEQ ID NO:267. In some aspects, VH1 and VH3 comprise the amino acid sequence of SEQ ID NO:58; VH2 and VH4 comprise the amino acid sequence of SEQ ID NO:271; VL1 and VL3 comprise the amino acid sequence of SEQ ID NO:54; and VL2 and VL4 comprise the amino acid sequence of SEQ ID NO:267. In some aspects, L1-L16 comprise the amino acid sequence of any one of SEQ ID NOs:1-34, wherein SEQ ID NO:1 has the amino acid sequence of G, SEQ ID NO:2 has the amino acid sequence of A, SEQ ID NO:3 has the amino acid sequence of GSS and SEQ ID NO:4 has the amino acid sequence of ASG. In some aspects, L1 or L4 and L7 or L10 comprise the amino acid sequence of SEQ ID NO:6; L2 or L5 and L8 or L11 comprise the amino acid sequence of SEQ ID NO:27; and L3 or L6 and L9 or L12 comprise the amino acid sequence of SEQ ID NO:6. In some aspects, L1 or L5 and L9 or L13 comprise the amino acid sequence of SEQ ID NO:6; L2 or L6 and L10 or L14 comprise the amino acid sequence of SEQ ID NO:27; L3 or L7 and L11 or L15 comprise the amino acid sequence of SEQ ID NO:6; and L4 or L8 and L12 or L16 comprise the amino acid sequence of SEQ ID NO:12. In some aspects, Fc comprises a knob-into-hole modification or Fc effector function knockout mutation. In some aspects, Fc comprises an amino acid sequence having at least 80%, at least 85%, at least 90%, at least 91%, at least 92%, at least 93%, at least 94%, at least 95%, at least 96%, at least 97%, at least 98%, at least 99%, or 100% identity to SEQ ID NO:37. In some aspects, Fc comprises the amino acid sequence of SEQ ID NO:37. In some preferred aspects, VH1, VH2, VH3, VH4, VL1, VL2, VL3 and VL4 have at least 90% identity with the corresponding amino acid sequences specified above, optionally with (i) an Fc having at least 90% identity with the corresponding amino acid sequence recited above; and/or (ii) one or more linker sequence as specified above. In some particularly preferred aspects, VH1, VH2, VH3, VH4, VL1, VL2, VL3 and VL4 comprise or consist of the corresponding amino acid sequences specified above, optionally with (i) an Fc comprising or consisting of the corresponding amino acid sequence recited above; and/or (ii) one or more linker sequence as specified above.

[0720] In some aspects, the first polypeptide comprises an amino acid sequence having at least 80%, at least 85%, at least 90%, at least 91%, at least 92%, at least 93%, at least 94%, at least 95%, at least 96%, at least 97%, at least 98%, at least 99%, or 100% identity to SEQ ID NO:315; and the second polypeptide comprises an amino acid sequence having at least 80%, at least 85%, at least 90%, at least 91%, at least 92%, at least 93%, at least 94%, at least 95%, at least 96%, at least 97%, at least 98%, at least 99%, or 100% identity to SEQ ID NO:315. In some aspects, both the first polypeptide and the second polypeptide have at least 90% identity to SEQ ID NO:315. In some aspects, the first polypeptide comprises the amino acid sequence of SEQ ID NO:315; and the second polypeptide comprises the amino acid sequence of SEQ ID NO:315. In some aspects, the first polypeptide comprises an amino acid sequence encoded by a polynucleotide having at least 80%, at least 85%, at least 90%, at least 91%, at least 92%, at least 93%, at least 94%, at least 95%, at least 96%, at least 97%, at least 98%, at least 99%, or 100% identity to SEQ ID NO:316; and the second polypeptide comprises an amino acid sequence encoded by a polynucleotide having at least 80%, at least 85%, at least 90%, at least 91%, at least 92%, at least 93%, at least 94%, at least 95%, at least 96%, at least 97%, at least 98%, at least 99%, or 100% identity to SEQ ID NO:316. In some aspects, the first polypeptide comprises an amino acid sequence encoded by a polynucleotide having at least 90% identity to SEQ ID NO:316 and the second polypeptide comprises an amino acid sequence encoded by a polynucleotide having at least 90% identity to SEQ ID NO:316. In some aspects, the first polypeptide comprises an amino acid sequence encoded by the polynucleotide of SEQ ID NO:316; and the second polypeptide comprises an amino acid sequence encoded by the polynucleotide of SEQ ID NO:316.

[0721] In some aspects, VH1 and VH3 comprise an amino acid sequence having at least 80%, at least 85%, at least 90%, at least 91%, at least 92%, at least 93%, at least 94%, at least 95%, at least 96%, at least 97%, at least 98%, at least 99%, or 100% identity to SEQ ID NO:279; VH2 and VH4 comprise an amino acid sequence having at least 80%, at least 85%, at least 90%, at least 91%, at least 92%, at least 93%, at least 94%, at least 95%, at least 96%, at least 97%, at least 98%, at least 99%, or 100% identity to SEQ ID NO:271; VL1 and VL3 comprise an amino acid sequence having at least 80%, at least 85%, at least 90%, at least 91%, at least 92%, at least 93%, at least 94%, at least 95%, at least 96%, at least 97%, at least 98%, at least 99%, or 100% identity to SEQ ID NO:275; and VL2 and VL4 comprise an amino acid sequence having at least 80%, at least 85%, at least 90%, at least 91%, at least 92%, at least 93%, at least 94%, at least 95%, at least 96%, at least 97%, at least 98%, at least 99%, or 100% identity to SEQ ID NO:267. In some aspects, VH1 and VH3 comprise the amino acid sequence of SEQ ID NO:279; VH2 and VH4 comprise the amino acid sequence of SEQ ID NO:271; VL1 and VL3 comprise the amino acid sequence of SEQ ID NO:275; and VL2 and VL4 comprise the amino acid sequence of SEQ ID NO:267. In some aspects, L1-L16 comprise the amino acid sequence of any one of SEQ ID NOs:1-34, wherein SEQ ID NO:1 has the amino acid sequence of G, SEQ ID NO:2 has the amino acid sequence of A, SEQ ID NO:3 has the amino acid sequence of GSS and SEQ ID NO:4 has the amino acid sequence of ASG. In some aspects, L1 or L4 and L7 or L10 comprise the amino acid sequence of SEQ ID NO:6; L2 or L5 and L8 or L11 comprise the amino acid sequence of SEQ ID NO: 27; and L3 or L6 and L9 or L12 comprise the amino acid sequence of SEQ ID NO:6. In some aspects, L1 or L5 and L9 or L13 comprise the amino acid sequence of SEQ ID NO:6; L2 or L6 and L10 or L14 comprise the amino acid sequence of SEQ ID NO:27; L3 or L7 and L11 or L15 comprise the amino acid sequence of SEQ ID NO:6; and L4 or L8 and L12 or L16 comprise the amino acid sequence of SEQ ID NO:12. In some aspects, Fc comprises a knob-into-hole modification or Fc effector function knockout mutation. In some aspects, Fc comprises an amino acid sequence having at least 80%, at least 85%, at least 90%, at least 91%, at least 92%, at least 93%, at least 94%, at least 95%, at least 96%, at least 97%, at least 98%, at least 99%, or 100% identity to SEQ ID NO:37. In some aspects, Fc comprises the amino acid sequence of SEQ ID NO:37. In some aspects, the sequence has a mutation at N62, for example, N62Q or N62Q at, for example, SEQ ID NO:279. In some preferred aspects, VH1, VH2, VH3, VH4, VL1, VL2, VL3 and VL4 have at least 90% identity with the corresponding amino acid sequences specified above, optionally with (i) an Fc having at least 90% identity with the corresponding amino acid sequence recited above; and/or (ii) one or more linker sequence as specified above. In some particularly preferred aspects, VH1, VH2, VH3, VH4, VL1, VL2, VL3 and VL4 comprise or consist of the corresponding amino acid sequences specified above, optionally with (i) an Fc comprising or consisting of the corresponding amino acid sequence recited above; and/or (ii) one or more linker sequence as specified above.

[0722] In some aspects, the first polypeptide comprises an amino acid sequence having at least 80%, at least 85%, at least 90%, at least 91%, at least 92%, at least 93%, at least 94%, at least 95%, at least 96%, at least 97%, at least 98%, at least 99%, or 100% identity to SEQ ID NO:256; and the second polypeptide comprises an amino acid sequence having at least 80%, at least 85%, at least 90%, at least 91%, at least 92%, at least 93%, at least 94%, at least 95%, at least 96%, at least 97%, at least 98%, at least 99%, or 100% identity to SEQ ID NO:256. In some aspects, both the first polypeptide and the second polypeptide have at least 90% identity to SEQ ID NO:256. In some aspects, the first polypeptide comprises the amino acid sequence of SEQ ID NO:256; and the second polypeptide comprises the amino acid sequence of SEQ ID NO:256. In some aspects, the first polypeptide comprises an amino acid sequence encoded by a polynucleotide having at least 80%, at least 85%, at least 90%, at least 91%, at least 92%, at least 93%, at least 94%, at least 95%, at least 96%, at least 97%, at least 98%, at least 99%, or 100% identity to SEQ ID NO:507; and the second polypeptide comprises an amino acid sequence encoded by a polynucleotide having at least 80%, at least 85%, at least 90%, at least 91%, at least 92%, at least 93%, at least 94%, at least 95%, at least 96%, at least 97%, at least 98%, at least 99%, or 100% identity to SEQ ID NO:507. In some aspects, both the first polypeptide and the second polypeptide comprise an amino acid sequence encoded by a polynucleotide having at least 90% identity to SEQ ID NO:507. In some aspects, the first polypeptide comprises an amino acid sequence encoded by the polynucleotide of SEQ ID NO:507; and the second polypeptide comprises an amino acid sequence encoded by the polynucleotide of SEQ ID NO:507.

[0723] In some aspects, VH1 and VH3 comprise an amino acid sequence having at least 80%, at least 85%, at least 90%, at least 91%, at least 92%, at least 93%, at least 94%, at least 95%, at least 96%, at least 97%, at least 98%, at least 99%, or 100% identity to SEQ ID NO:271; VH2 and VH4 comprise an amino acid sequence having at least 80%, at least 85%, at least 90%, at least 91%, at least 92%, at least 93%, at least 94%, at least 95%, at least 96%, at least 97%, at least 98%, at least 99%, or 100% identity to SEQ ID NO:58; VL1 and VL3 comprise an amino acid sequence having at least 80%, at least 85%, at least 90%, at least 91%, at least 92%, at least 93%, at least 94%, at least 95%, at least 96%, at least 97%, at least 98%, at least 99%, or 100% identity to SEQ ID NO:267; and VL2 and VL4 comprise an amino acid sequence having at least 80%, at least 85%, at least 90%, at least 91%, at least 92%, at least 93%, at least 94%, at least 95%, at least 96%, at least 97%, at least 98%, at least 99%, or 100% identity to SEQ ID NO:54. In some aspects, VH1 and VH3 comprise the amino acid sequence of SEQ ID NO:271; VH2 and VH4 comprise the amino acid sequence of SEQ ID NO:58; VL1 and VL3 comprise the amino acid sequence of SEQ ID NO:267; and VL2 and VL4 comprise the amino acid sequence of SEQ ID NO:54. In some aspects, L1-L16 comprise the amino acid sequence of any one of SEQ ID NOs:1-34, wherein SEQ ID NO:1 has the amino acid sequence of G, SEQ ID NO:2 has the amino acid sequence of A, SEQ ID NO:3 has the amino acid sequence of GSS and SEQ ID NO:4 has the amino acid sequence of ASG. In some aspects, L1 or L4 and L7 or L10 comprise the amino acid sequence of SEQ ID NO:6; L2 or L5 and L8 or L11 comprise the amino acid sequence of SEQ ID NO:27; and L3 or L6 and L9 or L12 comprise the amino acid sequence of SEQ ID NO:6. In some aspects, L1 or L5 and L9 or L13 comprise the amino acid sequence of SEQ ID NO:6; L2 or L6 and L10 or L14 comprise the amino acid sequence of SEQ ID NO:27; L3 or L7 and L11 or L15 comprise the amino acid sequence of SEQ ID NO:6; and L4 or L8 and L12 or L16 comprise the amino acid sequence of SEQ ID NO:12. In some aspects, Fc comprises a knob-into-hole modification or Fc effector function knockout mutation. In some aspects, Fc comprises an amino acid sequence having at least 80%, at least 85%, at least 90%, at least 91%, at least 92%, at least 93%, at least 94%, at least 95%, at least 96%, at least 97%, at least 98%, at least 99%, or 100% identity to SEQ ID NO:37. In some aspects, Fc comprises the amino acid sequence of SEQ ID NO:37. In some preferred aspects, VH1, VH2, VH3, VH4, VL1, VL2, VL3 and VL4 have at least 90% identity with the corresponding amino acid sequences specified above, optionally with (i) an Fc having at least 90% identity with the corresponding amino acid sequence recited above; and/or (ii) one or more linker sequence as specified above. In some particularly preferred aspects, VH1, VH2, VH3, VH4, VL1, VL2, VL3 and VL4 comprise or consist of the corresponding amino acid sequences specified above, optionally with (i) an Fc comprising or consisting of the corresponding amino acid sequence recited above; and/or (ii) one or more linker sequence as specified above.

[0724] In some aspects, the first polypeptide comprises an amino acid sequence having at least 80%, at least 85%, at least 90%, at least 91%, at least 92%, at least 93%, at least 94%, at least 95%, at least 96%, at least 97%, at least 98%, at least 99%, or 100% identity to SEQ ID NO:317; and the second polypeptide comprises an amino acid sequence having at least 80%, at least 85%, at least 90%, at least 91%, at least 92%, at least 93%, at least 94%, at least 95%, at least 96%, at least 97%, at least 98%, at least 99%, or 100% identity to SEQ ID NO:317. In some aspects, both the first polypeptide and the second polypeptide have at least 90% identity to SEQ ID NO:317. In some aspects, the first polypeptide comprises the amino acid sequence of SEQ ID NO:317; and the second polypeptide comprises the amino acid sequence of SEQ ID NO:317. In some aspects, the first polypeptide comprises an amino acid sequence encoded by a polynucleotide having at least 80%, at least 85%, at least 90%, at least 91%, at least 92%, at least 93%, at least 94%, at least 95%, at least 96%, at least 97%, at least 98%, at least 99%, or 100% identity to SEQ ID NO:318; and the second polypeptide comprises an amino acid sequence encoded by a polynucleotide having at least 80%, at least 85%, at least 90%, at least 91%, at least 92%, at least 93%, at least 94%, at least 95%, at least 96%, at least 97%, at least 98%, at least 99%, or 100% identity to SEQ ID NO:318. In some aspects, both the first polypeptide and the second polypeptide comprise an amino acid sequence encoded by a polynucleotide having at least 90% identity to SEQ ID NO:318. In some aspects, the first polypeptide comprises an amino acid sequence encoded by the polynucleotide of SEQ ID NO:318; and the second polypeptide comprises an amino acid sequence encoded by the polynucleotide of SEQ ID NO:318.

[0725] In some aspects, VH1 and VH3 comprise an amino acid sequence having at least 80%, at least 85%, at least 90%, at least 91%, at least 92%, at least 93%, at least 94%, at least 95%, at least 96%, at least 97%, at least 98%, at least 99%, or 100% identity to SEQ ID NO:271; VH2 and VH4 comprise an amino acid sequence having at least 80%, at least 85%, at least 90%, at least 91%, at least 92%, at least 93%, at least 94%, at least 95%, at least 96%, at least 97%, at least 98%, at least 99%, or 100% identity to SEQ ID NO:279; VL1 and VL3 comprise an amino acid sequence having at least 80%, at least 85%, at least 90%, at least 91%, at least 92%, at least 93%, at least 94%, at least 95%, at least 96%, at least 97%, at least 98%, at least 99%, or 100% identity to SEQ ID NO:267; and VL2 and VL4 comprise an amino acid sequence having at least 80%, at least 85%, at least 90%, at least 91%, at least 92%, at least 93%, at least 94%, at least 95%, at least 96%, at least 97%, at least 98%, at least 99%, or 100% identity to SEQ ID NO:275. In some aspects, VH1 and VH3 comprise the amino acid sequence of SEQ ID NO:271; VH2 and VH4 comprise the amino acid sequence of SEQ ID NO:279; VL1 and VL3 comprise the amino acid sequence of SEQ ID NO:267; and VL2 and VL4 comprise the amino acid sequence of SEQ ID NO:275. In some aspects, L1-L16 comprise the amino acid sequence of any one of SEQ ID NOs:1-34, wherein SEQ ID NO:1 has the amino acid sequence of G, SEQ ID NO:2 has the amino acid sequence of A, SEQ ID NO:3 has the amino acid sequence of GSS and SEQ ID NO:4 has the amino acid sequence of ASG. In some aspects, L1 or L4 and L7 or L10 comprise the amino acid sequence of SEQ ID NO:6; L2 or L5 and L8 or L11 comprise the amino acid sequence of SEQ ID NO: 27; and L3 or L6 and L9 or L12 comprise the amino acid sequence of SEQ ID NO:6. In some aspects, L1 or L5 and L9 or L13 comprise the amino acid sequence of SEQ ID NO:6; L2 or L6 and L10 or L14 comprise the amino acid sequence of SEQ ID NO:27; L3 or L7 and L11 or L15 comprise the amino acid sequence of SEQ ID NO:6; and L4 or L8 and L12 or L16 comprise the amino acid sequence of SEQ ID NO:12. In some aspects, Fc comprises a knob-into-hole modification or Fc effector function knockout mutation. In some aspects, Fc comprises an amino acid sequence having at least 80%, at least 85%, at least 90%, at least 91%, at least 92%, at least 93%, at least 94%, at least 95%, at least 96%, at least 97%, at least 98%, at least 99%, or 100% identity to SEQ ID NO:37. In some aspects, Fc comprises the amino acid sequence of SEQ ID NO:37. In some aspects, the sequence has a mutation at N62, for example, N62Q or N62Q at, for example, SEQ ID NO:279. In some preferred aspects, VH1, VH2, VH3, VH4, VL1, VL2, VL3 and VL4 have at least 90% identity with the corresponding amino acid sequences specified above, optionally with (i) an Fc having at least 90% identity with the corresponding amino acid sequence recited above; and/or (ii) one or more linker sequence as specified above. In some particularly preferred aspects, VH1, VH2, VH3, VH4, VL1, VL2, VL3 and VL4 comprise or consist of the corresponding amino acid sequences specified above, optionally with (i) an Fc comprising or consisting of the corresponding amino acid sequence recited above; and/or (ii) one or more linker sequence as specified above.

[0726] In some aspects, the first polypeptide comprises an amino acid sequence having at least 80%, at least 85%, at least 90%, at least 91%, at least 92%, at least 93%, at least 94%, at least 95%, at least 96%, at least 97%, at least 98%, at least 99%, or 100% identity to SEQ ID NO:319; and the second polypeptide comprises an amino acid sequence having at least 80%, at least 85%, at least 90%, at least 91%, at least 92%, at least 93%, at least 94%, at least 95%, at least 96%, at least 97%, at least 98%, at least 99%, or 100% identity to SEQ ID NO:319. In some aspects, both the first polypeptide and the second polypeptide have at least 90% identity to SEQ ID NO:319. In some aspects, the first polypeptide comprises the amino acid sequence of SEQ ID NO:319; and the second polypeptide comprises the amino acid sequence of SEQ ID NO:319. In some aspects, the first polypeptide comprises an amino acid sequence encoded by a polynucleotide having at least 80%, at least 85%, at least 90%, at least 91%, at least 92%, at least 93%, at least 94%, at least 95%, at least 96%, at least 97%, at least 98%, at least 99%, or 100% identity to SEQ ID NO:320; and the second polypeptide comprises an amino acid sequence encoded by a polynucleotide having at least 80%, at least 85%, at least 90%, at least 91%, at least 92%, at least 93%, at least 94%, at least 95%, at least 96%, at least 97%, at least 98%, at least 99%, or 100% identity to SEQ ID NO:320. In some aspects, both the first polypeptide and the second polypeptide comprise an amino acid sequence encoded by a polynucleotide having at least 90% identity to SEQ ID NO:320. In some aspects, the first polypeptide comprises an amino acid sequence encoded by the polynucleotide of SEQ ID NO:320; and the second polypeptide comprises an amino acid sequence encoded by the polynucleotide of SEQ ID NO:320.

[0727] In some aspects, VH1 and VH4 comprise an amino acid sequence having at least 80%, at least 85%, at least 90%, at least 91%, at least 92%, at least 93%, at least 94%, at least 95%, at least 96%, at least 97%, at least 98%, at least 99%, or 100% identity to SEQ ID NO:271; VH2 and VH3 comprise an amino acid sequence having at least 80%, at least 85%, at least 90%, at least 91%, at least 92%, at least 93%, at least 94%, at least 95%, at least 96%, at least 97%, at least 98%, at least 99%, or 100% identity to SEQ ID NO:58; VL1 and VL4 comprise an amino acid sequence having at least 80%, at least 85%, at least 90%, at least 91%, at least 92%, at least 93%, at least 94%, at least 95%, at least 96%, at least 97%, at least 98%, at least 99%, or 100% identity to SEQ ID NO:267; and VL2 and VL3 comprise an amino acid sequence having at least 80%, at least 85%, at least 90%, at least 91%, at least 92%, at least 93%, at least 94%, at least 95%, at least 96%, at least 97%, at least 98%, at least 99%, or 100% identity to SEQ ID NO:54. In some aspects, VH1 and VH4 comprise the amino acid sequence of SEQ ID NO:271; VH2 and VH3 comprise the amino acid sequence of SEQ ID NO:58; VL1 and VL4 comprise the amino acid sequence of SEQ ID NO:267; and VL2 and VL3 comprise the amino acid sequence of SEQ ID NO:54. In some aspects, L1-L16 comprise the amino acid sequence of any one of SEQ ID NOs:1-34, wherein SEQ ID NO:1 has the amino acid sequence of G, SEQ ID NO:2 has the amino acid sequence of A, SEQ ID NO:3 has the amino acid sequence of GSS and SEQ ID NO:4 has the amino acid sequence of ASG. In some aspects, L1 or L4 and L7 or L10 comprise the amino acid sequence of SEQ ID NO:6; L2 or L5 and L8 or L11 comprise the amino acid sequence of SEQ ID NO:27; and L3 or L6 and L9 or L12 comprise the amino acid sequence of SEQ ID NO:6. In some aspects, L1 or L5 and L9 or L13 comprise the amino acid sequence of SEQ ID NO:6; L2 or L6 and L10 or L14 comprise the amino acid sequence of SEQ ID NO:27; L3 or L7 and L11 or L15 comprise the amino acid sequence of SEQ ID NO:6; and L4 or L8 and L12 or L16 comprise the amino acid sequence of SEQ ID NO:12. In some aspects, Fc comprises a knob-into-hole modification or Fc effector function knockout mutation. In some aspects, Fc comprises an amino acid sequence having at least 80%, at least 85%, at least 90%, at least 91%, at least 92%, at least 93%, at least 94%, at least 95%, at least 96%, at least 97%, at least 98%, at least 99%, or 100% identity to SEQ ID NO:293 or 294. In some aspects, Fc comprises the amino acid sequence of SEQ ID NO:293 or 294. In some preferred aspects, VH1, VH2, VH3, VH4, VL1, VL2, VL3 and VL4 have at least 90% identity with the corresponding amino acid sequences specified above, optionally with (i) an Fc having at least 90% identity with the corresponding amino acid sequence recited above; and/or (ii) one or more linker sequence as specified above. In some particularly preferred aspects, VH1, VH2, VH3, VH4, VL1, VL2, VL3 and VL4 comprise or consist of the corresponding amino acid sequences specified above, optionally with (i) an Fc comprising or consisting of the corresponding amino acid sequence recited above; and/or (ii) one or more linker sequence as specified above.

[0728] In some aspects, the first polypeptide comprises an amino acid sequence having at least 80%, at least 85%, at least 90%, at least 91%, at least 92%, at least 93%, at least 94%, at least 95%, at least 96%, at least 97%, at least 98%, at least 99%, or 100% identity to SEQ ID NO:321; and the second polypeptide comprises an amino acid sequence having at least 80%, at least 85%, at least 90%, at least 91%, at least 92%, at least 93%, at least 94%, at least 95%, at least 96%, at least 97%, at least 98%, at least 99%, or 100% identity to SEQ ID NO:323. In some aspects, the first polypeptide has at least 90% identity to SEQ ID NO:321 and the second polypeptide has at least 90% identity to SEQ ID NO:323. In some aspects, the first polypeptide comprises the amino acid sequence of SEQ ID NO:321; and the second polypeptide comprises the amino acid sequence of SEQ ID NO:323. In some aspects, the first polypeptide comprises an amino acid sequence encoded by a polynucleotide having at least 80%, at least 85%, at least 90%, at least 91%, at least 92%, at least 93%, at least 94%, at least 95%, at least 96%, at least 97%, at least 98%, at least 99%, or 100% identity to SEQ ID NO:322; and the second polypeptide comprises an amino acid sequence encoded by a polynucleotide having at least 80%, at least 85%, at least 90%, at least 91%, at least 92%, at least 93%, at least 94%, at least 95%, at least 96%, at least 97%, at least 98%, at least 99%, or 100% identity to SEQ ID NO:324. In some aspects, the first polypeptide comprises an amino acid sequence encoded by a polynucleotide having at least 90% identity to SEQ ID NO:322 and the second polypeptide comprises an amino acid sequence encoded by a polynucleotide having at least 90% identity to SEQ ID NO:324. In some aspects, the first polypeptide comprises an amino acid sequence encoded by the polynucleotide of SEQ ID NO:322; and the second polypeptide comprises an amino acid sequence encoded by the polynucleotide of SEQ ID NO:324.

[0729] In some aspects, VH1 and VH4 comprise an amino acid sequence having at least 80%, at least 85%, at least 90%, at least 91%, at least 92%, at least 93%, at least 94%, at least 95%, at least 96%, at least 97%, at least 98%, at least 99%, or 100% identity to SEQ ID NO:271; VH2 and VH3 comprise an amino acid sequence having at least 80%, at least 85%, at least 90%, at least 91%, at least 92%, at least 93%, at least 94%, at least 95%, at least 96%, at least 97%, at least 98%, at least 99%, or 100% identity to SEQ ID NO:279; VL1 and VL4 comprise an amino acid sequence having at least 80%, at least 85%, at least 90%, at least 91%, at least 92%, at least 93%, at least 94%, at least 95%, at least 96%, at least 97%, at least 98%, at least 99%, or 100% identity to SEQ ID NO:267; and VL2 and VL3 comprise an amino acid sequence having at least 80%, at least 85%, at least 90%, at least 91%, at least 92%, at least 93%, at least 94%, at least 95%, at least 96%, at least 97%, at least 98%, at least 99%, or 100% identity to SEQ ID NO:275. In some aspects, VH1 and VH4 comprise the amino acid sequence of SEQ ID NO:271; VH2 and VH3 comprise the amino acid sequence of SEQ ID NO:279; VL1 and VL4 comprise the amino acid sequence of SEQ ID NO:267; and VL2 and VL3 comprise the amino acid sequence of SEQ ID NO:275. In some aspects, L1-L16 comprise the amino acid sequence of any one of SEQ ID NOs:1-34, wherein SEQ ID NO:1 has the amino acid sequence of G, SEQ ID NO:2 has the amino acid sequence of A, SEQ ID NO:3 has the amino acid sequence of GSS and SEQ ID NO:4 has the amino acid sequence of ASG. In some aspects, L1 or L4 and L7 or L10 comprise the amino acid sequence of SEQ ID NO:6; L2 or L5 and L8 or L11 comprise the amino acid sequence of SEQ ID NO:27; and L3 or L6 and L9 or L12 comprise the amino acid sequence of SEQ ID NO:6. In some aspects, L1 or L5 and L9 or L13 comprise the amino acid sequence of SEQ ID NO:6; L2 or L6 and L10 or L14 comprise the amino acid sequence of SEQ ID NO:27; L3 or L7 and L11 or L15 comprise the amino acid sequence of SEQ ID NO:6; and L4 or L8 and L12 or L16 comprise the amino acid sequence of SEQ ID NO:12. In some aspects, Fc comprises a knob-into-hole modification or Fc effector function knockout mutation. In some aspects, Fc comprises an amino acid sequence having at least 80%, at least 85%, at least 90%, at least 91%, at least 92%, at least 93%, at least 94%, at least 95%, at least 96%, at least 97%, at least 98%, at least 99%, or 100% identity to SEQ ID NO:293 or 294. In some aspects, Fc comprises the amino acid sequence of SEQ ID NO:293 or 294. In some aspects, the sequence has a mutation at N62, for example, N62Q or N62Q at, for example, SEQ ID NO:279. In some preferred aspects, VH1, VH2, VH3, VH4, VL1, VL2, VL3 and VL4 have at least 90% identity with the corresponding amino acid sequences specified above, optionally with (i) an Fc having at least 90% identity with the corresponding amino acid sequence recited above; (ii) one or more linker sequence as specified above; and/or (iii) a mutation at N62 as recited above. In some particularly preferred aspects, VH1, VH2, VH3, VH4, VL1, VL2, VL3 and VL4 comprise or consist of the corresponding amino acid sequences specified above, optionally with (i) an Fc comprising or consisting of the corresponding amino acid sequence recited above; (ii) one or more linker sequence as specified above and/or (iii) a mutation at N62 as recited above.

[0730] In some aspects, the first polypeptide comprises an amino acid sequence having at least 80%, at least 85%, at least 90%, at least 91%, at least 92%, at least 93%, at least 94%, at least 95%, at least 96%, at least 97%, at least 98%, at least 99%, or 100% identity to SEQ ID NO:325; and the second polypeptide comprises an amino acid sequence having at least 80%, at least 85%, at least 90%, at least 91%, at least 92%, at least 93%, at least 94%, at least 95%, at least 96%, at least 97%, at least 98%, at least 99%, or 100% identity to SEQ ID NO:327. In some aspects, the first polypeptide has at least 90% identity to SEQ ID NO:325 and the second polypeptide has at least 90% identity to SEQ ID NO:327. In some aspects, the first polypeptide comprises the amino acid sequence of SEQ ID NO:325; and the second polypeptide comprises the amino acid sequence of SEQ ID NO:327. In some aspects, the first polypeptide comprises an amino acid sequence encoded by a polynucleotide having at least 80%, at least 85%, at least 90%, at least 91%, at least 92%, at least 93%, at least 94%, at least 95%, at least 96%, at least 97%, at least 98%, at least 99%, or 100% identity to SEQ ID NO:326; and the second polypeptide comprises an amino acid sequence encoded by a polynucleotide having at least 80%, at least 85%, at least 90%, at least 91%, at least 92%, at least 93%, at least 94%, at least 95%, at least 96%, at least 97%, at least 98%, at least 99%, or 100% identity to SEQ ID NO:328. In some aspects, the first polypeptide comprises an amino acid sequence encoded by a polynucleotide having at least 90% identity to SEQ ID NO:326 and the second polypeptide comprises an amino acid sequence encoded by a polynucleotide having at least 90% identity to SEQ ID NO:328. In some aspects, the first polypeptide comprises an amino acid sequence encoded by the polynucleotide of SEQ ID NO:326; and the second polypeptide comprises an amino acid sequence encoded by the polynucleotide of SEQ ID NO:328.

[0731] In some aspects, VH1 comprises an amino acid sequence having at least 80%, at least 85%, at least 90%, at least 91%, at least 92%, at least 93%, at least 94%, at least 95%, at least 96%, at least 97%, at least 98%, at least 99%, or 100% identity to SEQ ID NO:279; VH2 and VH3 comprise an amino acid sequence having at least 80%, at least 85%, at least 90%, at least 91%, at least 92%, at least 93%, at least 94%, at least 95%, at least 96%, at least 97%, at least 98%, at least 99%, or 100% identity to SEQ ID NO:287; VH4 comprises an amino acid sequence having at least 80%, at least 85%, at least 90%, at least 91%, at least 92%, at least 93%, at least 94%, at least 95%, at least 96%, at least 97%, at least 98%, at least 99%, or 100% identity to SEQ ID NO:58; VL1 comprises an amino acid sequence having at least 80%, at least 85%, at least 90%, at least 91%, at least 92%, at least 93%, at least 94%, at least 95%, at least 96%, at least 97%, at least 98%, at least 99%, or 100% identity to SEQ ID NO:275; VL2 and VL3 comprise an amino acid sequence having at least 80%, at least 85%, at least 90%, at least 91%, at least 92%, at least 93%, at least 94%, at least 95%, at least 96%, at least 97%, at least 98%, at least 99%, or 100% identity to SEQ ID NO:283; and VL4 comprises an amino acid sequence having at least 80%, at least 85%, at least 90%, at least 91%, at least 92%, at least 93%, at least 94%, at least 95%, at least 96%, at least 97%, at least 98%, at least 99%, or 100% identity to SEQ ID NO:54. In some aspects, VH1 comprises the amino acid sequence of SEQ ID NO:279; VH2 and VH3 comprise the amino acid sequence of SEQ ID NO:287; VH4 comprises the amino acid sequence of SEQ ID NO:58; VL1 comprises the amino acid sequence of SEQ ID NO:275; VL2 and VL3 comprise the amino acid sequence of SEQ ID NO:283; and VL4 comprises the amino acid sequence of SEQ ID NO:54. In some aspects, L1-L16 comprise the amino acid sequence of any one of SEQ ID NOs:1-34, wherein SEQ ID NO:1 has the amino acid sequence of G, SEQ ID NO:2 has the amino acid sequence of A, SEQ ID NO:3 has the amino acid sequence of GSS and SEQ ID NO:4 has the amino acid sequence of ASG. In some aspects, L1 or L4 and L7 or L10 comprise the amino acid sequence of SEQ ID NO:6; L2 or L5 and L8 or L11 comprise the amino acid sequence of SEQ ID NO:27; and L3 or L6 and L9 or L12 comprise the amino acid sequence of SEQ ID NO:6. In some aspects, L1 or L5 and L9 or L13 comprise the amino acid sequence of SEQ ID NO:6; L2 or L6 and L10 or L14 comprise the amino acid sequence of SEQ ID NO:27; L3 or L7 and L11 or L15 comprise the amino acid sequence of SEQ ID NO:6; and L4 or L8 and L12 or L16 comprise the amino acid sequence of SEQ ID NO:12. In some aspects, Fc comprises a knob-into-hole modification or Fc effector function knockout mutation. In some aspects, Fc comprises an amino acid sequence having at least 80%, at least 85%, at least 90%, at least 91%, at least 92%, at least 93%, at least 94%, at least 95%, at least 96%, at least 97%, at least 98%, at least 99%, or 100% identity to SEQ ID NO:37. In some aspects, Fc comprises the amino acid sequence of SEQ ID NO:37. In some aspects, the sequence has a mutation at N62, for example, N62Q or N62Q at, for example, SEQ ID NO:279. In some preferred aspects, VH1, VH2, VH3, VH4, VL1, VL2, VL3 and VL4 have at least 90% identity with the corresponding amino acid sequences specified above, optionally with (i) an Fc having at least 90% identity with the corresponding amino acid sequence recited above; (ii) one or more linker sequence as specified above; and/or (iii) a mutation at N62 as recited above. In some particularly preferred aspects, VH1, VH2, VH3, VH4, VL1, VL2, VL3 and VL4 comprise or consist of the corresponding amino acid sequences specified above, optionally with (i) an Fc comprising or consisting of the corresponding amino acid sequence recited above; (ii) one or more linker sequence as specified above; and/or (iii) a mutation at N62 as recited above.

[0732] In some aspects, the first polypeptide comprises an amino acid sequence having at least 80%, at least 85%, at least 90%, at least 91%, at least 92%, at least 93%, at least 94%, at least 95%, at least 96%, at least 97%, at least 98%, at least 99%, or 100% identity to SEQ ID NO:335; and the second polypeptide comprises an amino acid sequence having at least 80%, at least 85%, at least 90%, at least 91%, at least 92%, at least 93%, at least 94%, at least 95%, at least 96%, at least 97%, at least 98%, at least 99%, or 100% identity to SEQ ID NO:337. In some aspects, the first polypeptide has at least 90% identity to SEQ ID NO:335 and the second polypeptide has at least 90% identity to SEQ ID NO:337. In some aspects, the first polypeptide comprises the amino acid sequence of SEQ ID NO:335; and the second polypeptide comprises the amino acid sequence of SEQ ID NO:337. In some aspects, the first polypeptide comprises an amino acid sequence encoded by a polynucleotide having at least 80%, at least 85%, at least 90%, at least 91%, at least 92%, at least 93%, at least 94%, at least 95%, at least 96%, at least 97%, at least 98%, at least 99%, or 100% identity to SEQ ID NO:336; and the second polypeptide comprises an amino acid sequence encoded by a polynucleotide having at least 80%, at least 85%, at least 90%, at least 91%, at least 92%, at least 93%, at least 94%, at least 95%, at least 96%, at least 97%, at least 98%, at least 99%, or 100% identity to SEQ ID NO:338. In some aspects, the first polypeptide comprises an amino acid sequence encoded by a polynucleotide having at least 90% identity to SEQ ID NO:336 and the second polypeptide comprises an amino acid sequence encoded by a polynucleotide having at least 90% identity to SEQ ID NO:338. In some aspects, the first polypeptide comprises an amino acid sequence encoded by the polynucleotide of SEQ ID NO:336; and the second polypeptide comprises an amino acid sequence encoded by the polynucleotide of SEQ ID NO:338.

[0733] In some aspects, VH1 and VH3 comprise an amino acid sequence having at least 80%, at least 85%, at least 90%, at least 91%, at least 92%, at least 93%, at least 94%, at least 95%, at least 96%, at least 97%, at least 98%, at least 99%, or 100% identity to SEQ ID NO:287; VH2 and VH4 comprise an amino acid sequence having at least 80%, at least 85%, at least 90%, at least 91%, at least 92%, at least 93%, at least 94%, at least 95%, at least 96%, at least 97%, at least 98%, at least 99%, or 100% identity to SEQ ID NO:279; VL1 and VL3 comprise an amino acid sequence having at least 80%, at least 85%, at least 90%, at least 91%, at least 92%, at least 93%, at least 94%, at least 95%, at least 96%, at least 97%, at least 98%, at least 99%, or 100% identity to SEQ ID NO:283; and VL2 and VL4 comprise an amino acid sequence having at least 80%, at least 85%, at least 90%, at least 91%, at least 92%, at least 93%, at least 94%, at least 95%, at least 96%, at least 97%, at least 98%, at least 99%, or 100% identity to SEQ ID NO:275. In some aspects, VH1 and VH3 comprise the amino acid sequence of SEQ ID NO:287; VH2 and VH4 comprise the amino acid sequence of SEQ ID NO:279; VL1 and VL3 comprise the amino acid sequence of SEQ ID NO:283; and VL2 and VL4 comprise the amino acid sequence of SEQ ID NO:275. In some aspects, L1-L16 comprise the amino acid sequence of any one of SEQ ID NOs:1-34, wherein SEQ ID NO:1 has the amino acid sequence of G, SEQ ID NO:2 has the amino acid sequence of A, SEQ ID NO:3 has the amino acid sequence of GSS and SEQ ID NO:4 has the amino acid sequence of ASG. In some aspects, L1 or L4 and L7 or L10 comprise the amino acid sequence of SEQ ID NO: 6; L2 or L5 and L8 or L11 comprise the amino acid sequence of SEQ ID NO:27; and L3 or L6 and L9 or L12 comprise the amino acid sequence of SEQ ID NO:6. In some aspects, L1 or L5 and L9 or L13 comprise the amino acid sequence of SEQ ID NO:6; L2 or L6 and L10 or L14 comprise the amino acid sequence of SEQ ID NO:27; L3 or L7 and L11 or L15 comprise the amino acid sequence of SEQ ID NO:6; and L4 or L8 and L12 or L16 comprise the amino acid sequence of SEQ ID NO:12. In some aspects, Fc comprises a knob-into-hole modification or Fc effector function knockout mutation. In some aspects, Fc comprises an amino acid sequence having at least 80%, at least 85%, at least 90%, at least 91%, at least 92%, at least 93%, at least 94%, at least 95%, at least 96%, at least 97%, at least 98%, at least 99%, or 100% identity to SEQ ID NO:37. In some aspects, Fc comprises the amino acid sequence of SEQ ID NO:37. In some aspects, the sequence has a mutation at N62, for example, N62Q or N62Q at, for example, SEQ ID NO:279. In some preferred aspects, VH1, VH2, VH3, VH4, VL1, VL2, VL3 and VL4 have at least 90% identity with the corresponding amino acid sequences specified above, optionally with (i) an Fc having at least 90% identity with the corresponding amino acid sequence recited above; (ii) one or more linker sequence as specified above; and/or (iii) a mutation at N62 as recited above. In some particularly preferred aspects, VH1, VH2, VH3, VH4, VL1, VL2, VL3 and VL4 comprise or consist of the corresponding amino acid sequences specified above, optionally with (i) an Fc comprising or consisting of the corresponding amino acid sequence recited above; (ii) one or more linker sequence as specified above; and/or (iii) a mutation at N62 as recited above.

[0734] In some aspects, the first polypeptide comprises an amino acid sequence having at least 80%, at least 85%, at least 90%, at least 91%, at least 92%, at least 93%, at least 94%, at least 95%, at least 96%, at least 97%, at least 98%, at least 99%, or 100% identity to SEQ ID NO:339; and the second polypeptide comprises an amino acid sequence having at least 80%, at least 85%, at least 90%, at least 91%, at least 92%, at least 93%, at least 94%, at least 95%, at least 96%, at least 97%, at least 98%, at least 99%, or 100% identity to SEQ ID NO:339. In some aspects, both the first polypeptide and the second polypeptide have at least 90% identity to SEQ ID NO:339. In some aspects, the first polypeptide comprises the amino acid sequence of SEQ ID NO:339; and the second polypeptide comprises the amino acid sequence of SEQ ID NO:339. In some aspects, the first polypeptide comprises an amino acid sequence encoded by a polynucleotide having at least 80%, at least 85%, at least 90%, at least 91%, at least 92%, at least 93%, at least 94%, at least 95%, at least 96%, at least 97%, at least 98%, at least 99%, or 100% identity to SEQ ID NO:340; and the second polypeptide comprises an amino acid sequence encoded by a polynucleotide having at least 80%, at least 85%, at least 90%, at least 91%, at least 92%, at least 93%, at least 94%, at least 95%, at least 96%, at least 97%, at least 98%, at least 99%, or 100% identity to SEQ ID NO:340. In some aspects, both the first polypeptide and the second polypeptide comprise an amino acid sequence encoded by a polynucleotide having at least 90% identity to SEQ ID NO:340. In some aspects, the first polypeptide comprises an amino acid sequence encoded by the polynucleotide of SEQ ID NO:340; and the second polypeptide comprises an amino acid sequence encoded by the polynucleotide of SEQ ID NO:340.

[0735] In some aspects, VH1 and VH4 comprise an amino acid sequence having at least 80%, at least 85%, at least 90%, at least 91%, at least 92%, at least 93%, at least 94%, at least 95%, at least 96%, at least 97%, at least 98%, at least 99%, or 100% identity to SEQ ID NO:287; VH2 and VH3 comprise an amino acid sequence having at least 80%, at least 85%, at least 90%, at least 91%, at least 92%, at least 93%, at least 94%, at least 95%, at least 96%, at least 97%, at least 98%, at least 99%, or 100% identity to SEQ ID NO:279; VL1 and VL4 comprise an amino acid sequence having at least 80%, at least 85%, at least 90%, at least 91%, at least 92%, at least 93%, at least 94%, at least 95%, at least 96%, at least 97%, at least 98%, at least 99%, or 100% identity to SEQ ID NO:283; and VL2 and VL3 comprise an amino acid sequence having at least 80%, at least 85%, at least 90%, at least 91%, at least 92%, at least 93%, at least 94%, at least 95%, at least 96%, at least 97%, at least 98%, at least 99%, or 100% identity to SEQ ID NO:275. In some aspects, VH1 and VH4 comprise the amino acid sequence of SEQ ID NO:287; VH2 and VH3 comprise the amino acid sequence of SEQ ID NO:279; VL1 and VL4 comprise the amino acid sequence of SEQ ID NO:283; and VL2 and VL3 comprise the amino acid sequence of SEQ ID NO:275. In some aspects, L1-L16 comprise the amino acid sequence of any one of SEQ ID NOs:1-34, wherein SEQ ID NO:1 has the amino acid sequence of G, SEQ ID NO:2 has the amino acid sequence of A, SEQ ID NO:3 has the amino acid sequence of GSS and SEQ ID NO:4 has the amino acid sequence of ASG. In some aspects, L1 or L4 and L7 or L10 comprise the amino acid sequence of SEQ ID NO:6; L2 or L5 and L8 or L11 comprise the amino acid sequence of SEQ ID NO:27; and L3 or L6 and L9 or L12 comprise the amino acid sequence of SEQ ID NO:6. In some aspects, L1 or L5 and L9 or L13 comprise the amino acid sequence of SEQ ID NO:6; L2 or L6 and L10 or L14 comprise the amino acid sequence of SEQ ID NO:27; L3 or L7 and L11 or L15 comprise the amino acid sequence of SEQ ID NO:6; and L4 or L8 and L12 or L16 comprise the amino acid sequence of SEQ ID NO:12. In some aspects, Fc comprises a knob-into-hole modification or Fc effector function knockout mutation. In some aspects, Fc comprises an amino acid sequence having at least 80%, at least 85%, at least 90%, at least 91%, at least 92%, at least 93%, at least 94%, at least 95%, at least 96%, at least 97%, at least 98%, at least 99%, or 100% identity to SEQ ID NO:293 or 294. In some aspects, Fc comprises the amino acid sequence of SEQ ID NO:293-294. In some aspects, the sequence has a mutation at N62, for example, N62Q or N62Q at, for example, SEQ ID NO:279. In some preferred aspects, VH1, VH2, VH3, VH4, VL1, VL2, VL3 and VL4 have at least 90% identity with the corresponding amino acid sequences specified above, optionally with (i) an Fc having at least 90% identity with the corresponding amino acid sequence recited above; (ii) one or more linker sequence as specified above; and/or (iii) a mutation at N62 as recited above. In some particularly preferred aspects, VH1, VH2, VH3, VH4, VL1, VL2, VL3 and VL4 comprise or consist of the corresponding amino acid sequences specified above, optionally with (i) an Fc comprising or consisting of the corresponding amino acid sequence recited above; (ii) one or more linker sequence as specified above; and/or (iii) a mutation at N62 as recited above.

[0736] In some aspects, the first polypeptide comprises an amino acid sequence having at least 80%, at least 85%, at least 90%, at least 91%, at least 92%, at least 93%, at least 94%, at least 95%, at least 96%, at least 97%, at least 98%, at least 99%, or 100% identity to SEQ ID NO:341; and the second polypeptide comprises an amino acid sequence having at least 80%, at least 85%, at least 90%, at least 91%, at least 92%, at least 93%, at least 94%, at least 95%, at least 96%, at least 97%, at least 98%, at least 99%, or 100% identity to SEQ ID NO:343. In some aspects, the first polypeptide has at least 90% identity to SEQ ID NO:341 and the second polypeptide has at least 90% identity to SEQ ID NO:343. In some aspects, the first polypeptide comprises the amino acid sequence of SEQ ID NO:341; and the second polypeptide comprises the amino acid sequence of SEQ ID NO:343. In some aspects, the first polypeptide comprises an amino acid sequence encoded by a polynucleotide having at least 80%, at least 85%, at least 90%, at least 91%, at least 92%, at least 93%, at least 94%, at least 95%, at least 96%, at least 97%, at least 98%, at least 99%, or 100% identity to SEQ ID NO:342; and the second polypeptide comprises an amino acid sequence encoded by a polynucleotide having at least 80%, at least 85%, at least 90%, at least 91%, at least 92%, at least 93%, at least 94%, at least 95%, at least 96%, at least 97%, at least 98%, at least 99%, or 100% identity to SEQ ID NO:344. In some aspects, the first polypeptide comprises an amino acid sequence encoded by a polynucleotide having at least 90% identity to SEQ ID NO:342 and the second polypeptide comprises an amino acid sequence encoded by a polynucleotide having at least 90% identity to SEQ ID NO:344. In some aspects, the first polypeptide comprises an amino acid sequence encoded by the polynucleotide of SEQ ID NO:342; and the second polypeptide comprises an amino acid sequence encoded by the polynucleotide of SEQ ID NO:344.

[0737] In some aspects, VH1 comprises an amino acid sequence having at least 80%, at least 85%, at least 90%, at least 91%, at least 92%, at least 93%, at least 94%, at least 95%, at least 96%, at least 97%, at least 98%, at least 99%, or 100% identity to SEQ ID NO:58; VH2 and VH3 comprise an amino acid sequence having at least 80%, at least 85%, at least 90%, at least 91%, at least 92%, at least 93%, at least 94%, at least 95%, at least 96%, at least 97%, at least 98%, at least 99%, or 100% identity to SEQ ID NO:263; VH4 comprises an amino acid sequence having at least 80%, at least 85%, at least 90%, at least 91%, at least 92%, at least 93%, at least 94%, at least 95%, at least 96%, at least 97%, at least 98%, at least 99%, or 100% identity to SEQ ID NO:279; VL1 comprises an amino acid sequence having at least 80%, at least 85%, at least 90%, at least 91%, at least 92%, at least 93%, at least 94%, at least 95%, at least 96%, at least 97%, at least 98%, at least 99%, or 100% identity to SEQ ID NO:54; VL2 and VL3 comprise an amino acid sequence having at least 80%, at least 85%, at least 90%, at least 91%, at least 92%, at least 93%, at least 94%, at least 95%, at least 96%, at least 97%, at least 98%, at least 99%, or 100% identity to SEQ ID NO:259; and VL4 comprises an amino acid sequence having at least 80%, at least 85%, at least 90%, at least 91%, at least 92%, at least 93%, at least 94%, at least 95%, at least 96%, at least 97%, at least 98%, at least 99%, or 100% identity to SEQ ID NO:275. In some aspects, VH1 comprises the amino acid sequence of SEQ ID NO:58; VH2 and VH3 comprise the amino acid sequence of SEQ ID NO:263; VH4 comprises the amino acid sequence of SEQ ID NO:279; VL1 comprises the amino acid sequence of SEQ ID NO:54; VL2 and VL3 comprise the amino acid sequence of SEQ ID NO:259; and VL4 comprises the amino acid sequence of SEQ ID NO:275. In some aspects, L1-L16 comprise the amino acid sequence of any one of SEQ ID NOs:1-34, wherein SEQ ID NO:1 has the amino acid sequence of G, SEQ ID NO:2 has the amino acid sequence of A, SEQ ID NO:3 has the amino acid sequence of GSS and SEQ ID NO:4 has the amino acid sequence of ASG. In some aspects, L1 or L4 and L7 or L10 comprise the amino acid sequence of SEQ ID NO:6; L2 or L5 and L8 or L11 comprise the amino acid sequence of SEQ ID NO:27; and L3 or L6 and L9 or L12 comprise the amino acid sequence of SEQ ID NO:6. In some aspects, L1 or L5 and L9 or L13 comprise the amino acid sequence of SEQ ID NO:6; L2 or L6 and L10 or L14 comprise the amino acid sequence of SEQ ID NO:27; L3 or L7 and L11 or L15 comprise the amino acid sequence of SEQ ID NO:6; and L4 or L8 and L12 or L16 comprise the amino acid sequence of SEQ ID NO:12. In some aspects, Fc comprises a knob-into-hole modification or Fc effector function knockout mutation. In some aspects, Fc comprises an amino acid sequence having at least 80%, at least 85%, at least 90%, at least 91%, at least 92%, at least 93%, at least 94%, at least 95%, at least 96%, at least 97%, at least 98%, at least 99%, or 100% identity to SEQ ID NO:293 or 294. In some aspects, Fc comprises the amino acid sequence of SEQ ID NO:293 or 294. In some aspects, the sequence has a mutation at N62, for example, N62Q or N62Q at, for example, SEQ ID NO:279. In some preferred aspects, VH1, VH2, VH3, VH4, VL1, VL2, VL3 and VL4 have at least 90% identity with the corresponding amino acid sequences specified above, optionally with (i) an Fc having at least 90% identity with the corresponding amino acid sequence recited above; (ii) one or more linker sequence as specified above; and/or (iii) a mutation at N62 as recited above. In some particularly preferred aspects, VH1, VH2, VH3, VH4, VL1, VL2, VL3 and VL4 comprise or consist of the corresponding amino acid sequences specified above, optionally with (i) an Fc comprising or consisting of the corresponding amino acid sequence recited above; (ii) one or more linker sequence as specified above; and/or (iii) a mutation at N62 as recited above.

[0738] In some aspects, the first polypeptide comprises an amino acid sequence having at least 80%, at least 85%, at least 90%, at least 91%, at least 92%, at least 93%, at least 94%, at least 95%, at least 96%, at least 97%, at least 98%, at least 99%, or 100% identity to SEQ ID NO:345; and the second polypeptide comprises an amino acid sequence having at least 80%, at least 85%, at least 90%, at least 91%, at least 92%, at least 93%, at least 94%, at least 95%, at least 96%, at least 97%, at least 98%, at least 99%, or 100% identity to SEQ ID NO:347. In some aspects, the first polypeptide has at least 90% identity to SEQ ID NO:345 and the second polypeptide has at least 90% identity to SEQ ID NO:347. In some aspects, the first polypeptide comprises the amino acid sequence of SEQ ID NO:345; and the second polypeptide comprises the amino acid sequence of SEQ ID NO:347. In some aspects, the first polypeptide comprises an amino acid sequence encoded by a polynucleotide having at least 80%, at least 85%, at least 90%, at least 91%, at least 92%, at least 93%, at least 94%, at least 95%, at least 96%, at least 97%, at least 98%, at least 99%, or 100% identity to SEQ ID NO:346; and the second polypeptide comprises an amino acid sequence encoded by a polynucleotide having at least 80%, at least 85%, at least 90%, at least 91%, at least 92%, at least 93%, at least 94%, at least 95%, at least 96%, at least 97%, at least 98%, at least 99%, or 100% identity to SEQ ID NO:348. In some aspects, the first polypeptide comprises an amino acid sequence encoded by a polynucleotide having at least 90% identity to SEQ ID NO:346 and the second polypeptide comprises an amino acid sequence encoded by a polynucleotide having at least 90% identity to SEQ ID NO:348. In some aspects, the first polypeptide comprises an amino acid sequence encoded by the polynucleotide of SEQ ID NO:346; and the second polypeptide comprises an amino acid sequence encoded by the polynucleotide of SEQ ID NO:348.

[0739] In some aspects, VH1 comprises an amino acid sequence having at least 80%, at least 85%, at least 90%, at least 91%, at least 92%, at least 93%, at least 94%, at least 95%, at least 96%, at least 97%, at least 98%, at least 99%, or 100% identity to SEQ ID NO:58; VH2 and VH4 comprise an amino acid sequence having at least 80%, at least 85%, at least 90%, at least 91%, at least 92%, at least 93%, at least 94%, at least 95%, at least 96%, at least 97%, at least 98%, at least 99%, or 100% identity to SEQ ID NO:263; VH3 comprises an amino acid sequence having at least 80%, at least 85%, at least 90%, at least 91%, at least 92%, at least 93%, at least 94%, at least 95%, at least 96%, at least 97%, at least 98%, at least 99%, or 100% identity to SEQ ID NO:279; VL1 comprises an amino acid sequence having at least 80%, at least 85%, at least 90%, at least 91%, at least 92%, at least 93%, at least 94%, at least 95%, at least 96%, at least 97%, at least 98%, at least 99%, or 100% identity to SEQ ID NO:54; VL2 and VL4 comprise an amino acid sequence having at least 80%, at least 85%, at least 90%, at least 91%, at least 92%, at least 93%, at least 94%, at least 95%, at least 96%, at least 97%, at least 98%, at least 99%, or 100% identity to SEQ ID NO:259; and VL3 comprises an amino acid sequence having at least 80%, at least 85%, at least 90%, at least 91%, at least 92%, at least 93%, at least 94%, at least 95%, at least 96%, at least 97%, at least 98%, at least 99%, or 100% identity to SEQ ID NO:275. In some aspects, VH1 comprises the amino acid sequence of SEQ ID NO:58; VH2 and VH4 comprise the amino acid sequence of SEQ ID NO:263; VH3 comprises the amino acid sequence of SEQ ID NO:279; VL1 comprises the amino acid sequence of SEQ ID NO:54; VL2 and VL4 comprise the amino acid sequence of SEQ ID NO:259; and VL3 comprises the amino acid sequence of SEQ ID NO:275. In some aspects, L1-L16 comprise the amino acid sequence of any one of SEQ ID NOs:1-34, wherein SEQ ID NO:1 has the amino acid sequence of G, SEQ ID NO:2 has the amino acid sequence of A, SEQ ID NO:3 has the amino acid sequence of GSS and SEQ ID NO:4 has the amino acid sequence of ASG. In some aspects, L1 or L4 and L7 or L10 comprise the amino acid sequence of SEQ ID NO:6; L2 or L5 and L8 or L11 comprise the amino acid sequence of SEQ ID NO:27; and L3 or L6 and L9 or L12 comprise the amino acid sequence of SEQ ID NO:6. In some aspects, L1 or L5 and L9 or L13 comprise the amino acid sequence of SEQ ID NO:6; L2 or L6 and L10 or L14 comprise the amino acid sequence of SEQ ID NO:27; L3 or L7 and L11 or L15 comprise the amino acid sequence of SEQ ID NO:6; and L4 or L8 and L12 or L16 comprise the amino acid sequence of SEQ ID NO:12. In some aspects, Fc comprises a knob-into-hole modification or Fc effector function knockout mutation. In some aspects, Fc comprises an amino acid sequence having at least 80%, at least 85%, at least 90%, at least 91%, at least 92%, at least 93%, at least 94%, at least 95%, at least 96%, at least 97%, at least 98%, at least 99%, or 100% identity to SEQ ID NO:293 or 294. In some aspects, Fc comprises the amino acid sequence of SEQ ID NO:293 or 294. In some aspects, the sequence has a mutation at N62, for example, N62Q or N62Q at, for example, SEQ ID NO:279. In some preferred aspects, VH1, VH2, VH3, VH4, VL1, VL2, VL3 and VL4 have at least 90% identity with the corresponding amino acid sequences specified above, optionally with (i) an Fc having at least 90% identity with the corresponding amino acid sequence recited above; (ii) one or more linker sequence as specified above; and/or (iii) a mutation at N62 as recited above. In some particularly preferred aspects, VH1, VH2, VH3, VH4, VL1, VL2, VL3 and VL4 comprise or consist of the corresponding amino acid sequences specified above, optionally with (i) an Fc comprising or consisting of the corresponding amino acid sequence recited above; (ii) one or more linker sequence as specified above; and/or (iii) a mutation at N62 as recited above.

[0740] In some aspects, the first polypeptide comprises an amino acid sequence having at least 80%, at least 85%, at least 90%, at least 91%, at least 92%, at least 93%, at least 94%, at least 95%, at least 96%, at least 97%, at least 98%, at least 99%, or 100% identity to SEQ ID NO:349; and the second polypeptide comprises an amino acid sequence having at least 80%, at least 85%, at least 90%, at least 91%, at least 92%, at least 93%, at least 94%, at least 95%, at least 96%, at least 97%, at least 98%, at least 99%, or 100% identity to SEQ ID NO:351. In some aspects, the first polypeptide has at least 90% identity to SEQ ID NO:349 and the second polypeptide has at least 90% identity to SEQ ID NO:351. In some aspects, the first polypeptide comprises the amino acid sequence of SEQ ID NO:349; and the second polypeptide comprises the amino acid sequence of SEQ ID NO:351. In some aspects, the first polypeptide comprises an amino acid sequence encoded by a polynucleotide having at least 80%, at least 85%, at least 90%, at least 91%, at least 92%, at least 93%, at least 94%, at least 95%, at least 96%, at least 97%, at least 98%, at least 99%, or 100% identity to SEQ ID NO:350; and the second polypeptide comprises an amino acid sequence encoded by a polynucleotide having at least 80%, at least 85%, at least 90%, at least 91%, at least 92%, at least 93%, at least 94%, at least 95%, at least 96%, at least 97%, at least 98%, at least 99%, or 100% identity to SEQ ID NO:352. In some aspects, the first polypeptide comprises an amino acid sequence encoded by a polynucleotide having at least 90% identity to SEQ ID NO:350 and the second polypeptide comprises an amino acid sequence encoded by a polynucleotide having at least 90% identity to SEQ ID NO:352. In some aspects, the first polypeptide comprises an amino acid sequence encoded by the polynucleotide of SEQ ID NO:350; and the second polypeptide comprises an amino acid sequence encoded by the polynucleotide of SEQ ID NO:352.

[0741] In some aspects, VH1 and VH3 comprise an amino acid sequence having at least 80%, at least 85%, at least 90%, at least 91%, at least 92%, at least 93%, at least 94%, at least 95%, at least 96%, at least 97%, at least 98%, at least 99%, or 100% identity to SEQ ID NO:263; VH2 comprises an amino acid sequence having at least 80%, at least 85%, at least 90%, at least 91%, at least 92%, at least 93%, at least 94%, at least 95%, at least 96%, at least 97%, at least 98%, at least 99%, or 100% identity to SEQ ID NO:58; VH4 comprises an amino acid sequence having at least 80%, at least 85%, at least 90%, at least 91%, at least 92%, at least 93%, at least 94%, at least 95%, at least 96%, at least 97%, at least 98%, at least 99%, or 100% identity to SEQ ID NO:279; VL1 and VL3 comprise an amino acid sequence having at least 80%, at least 85%, at least 90%, at least 91%, at least 92%, at least 93%, at least 94%, at least 95%, at least 96%, at least 97%, at least 98%, at least 99%, or 100% identity to SEQ ID NO:259; VL2 comprises an amino acid sequence having at least 80%, at least 85%, at least 90%, at least 91%, at least 92%, at least 93%, at least 94%, at least 95%, at least 96%, at least 97%, at least 98%, at least 99%, or 100% identity to SEQ ID NO:54; and VL4 comprises an amino acid sequence having at least 80%, at least 85%, at least 90%, at least 91%, at least 92%, at least 93%, at least 94%, at least 95%, at least 96%, at least 97%, at least 98%, at least 99%, or 100% identity to SEQ ID NO:275. In some aspects, VH1 and VH3 comprise the amino acid sequence of SEQ ID NO:263; VH2 comprises the amino acid sequence of SEQ ID NO:58; VH4 comprises the amino acid sequence of SEQ ID NO:279; VL1 and VL3 comprise the amino acid sequence of SEQ ID NO:259; VL2 comprises the amino acid sequence of SEQ ID NO:54; and VL4 comprises the amino acid sequence of SEQ ID NO:275. In some aspects, L1-L16 comprise the amino acid sequence of any one of SEQ ID NOs:1-34, wherein SEQ ID NO:1 has the amino acid sequence of G, SEQ ID NO:2 has the amino acid sequence of A, SEQ ID NO:3 has the amino acid sequence of GSS and SEQ ID NO:4 has the amino acid sequence of ASG. In some aspects, L1 or L4 and L7 or L10 comprise the amino acid sequence of SEQ ID NO:6; L2 or L5 and L8 or L11 comprise the amino acid sequence of SEQ ID NO:27; and L3 or L6 and L9 or L12 comprise the amino acid sequence of SEQ ID NO:6. In some aspects, L1 or L5 and L9 or L13 comprise the amino acid sequence of SEQ ID NO:6; L2 or L6 and L10 or L14 comprise the amino acid sequence of SEQ ID NO:27; L3 or L7 and L11 or L15 comprise the amino acid sequence of SEQ ID NO:6; and L4 or L8 and L12 or L16 comprise the amino acid sequence of SEQ ID NO:12. In some aspects, Fc comprises a knob-into-hole modification or Fc effector function knockout mutation. In some aspects, Fc comprises an amino acid sequence having at least 80%, at least 85%, at least 90%, at least 91%, at least 92%, at least 93%, at least 94%, at least 95%, at least 96%, at least 97%, at least 98%, at least 99%, or 100% identity to SEQ ID NO:293 or 294. In some aspects, Fc comprises the amino acid sequence of SEQ ID NO:293 or 294. In some aspects, the sequence has a mutation at N62, for example, N62Q or N62Q at, for example, SEQ ID NO:279. In some preferred aspects, VH1, VH2, VH3, VH4, VL1, VL2, VL3 and VL4 have at least 90% identity with the corresponding amino acid sequences specified above, optionally with (i) an Fc having at least 90% identity with the corresponding amino acid sequence recited above; (ii) one or more linker sequence as specified above; and/or (iii) a mutation at N62 as recited above. In some particularly preferred aspects, VH1, VH2, VH3, VH4, VL1, VL2, VL3 and VL4 comprise or consist of the corresponding amino acid sequences specified above, optionally with (i) an Fc comprising or consisting of the corresponding amino acid sequence recited above; (ii) one or more linker sequence as specified above; and/or (iii) a mutation at N62 as recited above.

[0742] In some aspects, the first polypeptide comprises an amino acid sequence having at least 80%, at least 85%, at least 90%, at least 91%, at least 92%, at least 93%, at least 94%, at least 95%, at least 96%, at least 97%, at least 98%, at least 99%, or 100% identity to SEQ ID NO:353; and the second polypeptide comprises an amino acid sequence having at least 80%, at least 85%, at least 90%, at least 91%, at least 92%, at least 93%, at least 94%, at least 95%, at least 96%, at least 97%, at least 98%, at least 99%, or 100% identity to SEQ ID NO:355. In some aspects, the first polypeptide has at least 90% identity to SEQ ID NO:353 and the second polypeptide has at least 90% identity to SEQ ID NO:355. In some aspects, the first polypeptide comprises the amino acid sequence of SEQ ID NO:353; and the second polypeptide comprises the amino acid sequence of SEQ ID NO:355. In some aspects, the first polypeptide comprises an amino acid sequence encoded by a polynucleotide having at least 80%, at least 85%, at least 90%, at least 91%, at least 92%, at least 93%, at least 94%, at least 95%, at least 96%, at least 97%, at least 98%, at least 99%, or 100% identity to SEQ ID NO:354; and the second polypeptide comprises an amino acid sequence encoded by a polynucleotide having at least 80%, at least 85%, at least 90%, at least 91%, at least 92%, at least 93%, at least 94%, at least 95%, at least 96%, at least 97%, at least 98%, at least 99%, or 100% identity to SEQ ID NO:356. In some aspects, the first polypeptide comprises an amino acid sequence encoded by a polynucleotide having at least 90% identity to SEQ ID NO:354 and the second polypeptide comprises an amino acid sequence encoded by a polynucleotide having at least 90% identity to SEQ ID NO:356. In some aspects, the first polypeptide comprises an amino acid sequence encoded by the polynucleotide of SEQ ID NO:354; and the second polypeptide comprises an amino acid sequence encoded by the polynucleotide of SEQ ID NO:356.

[0743] In some aspects, VH1 and VH4 comprise an amino acid sequence having at least 80%, at least 85%, at least 90%, at least 91%, at least 92%, at least 93%, at least 94%, at least 95%, at least 96%, at least 97%, at least 98%, at least 99%, or 100% identity to SEQ ID NO:263; VH2 comprises an amino acid sequence having at least 80%, at least 85%, at least 90%, at least 91%, at least 92%, at least 93%, at least 94%, at least 95%, at least 96%, at least 97%, at least 98%, at least 99%, or 100% identity to SEQ ID NO:58; VH3 comprises an amino acid sequence having at least 80%, at least 85%, at least 90%, at least 91%, at least 92%, at least 93%, at least 94%, at least 95%, at least 96%, at least 97%, at least 98%, at least 99%, or 100% identity to SEQ ID NO:279; VL1 and VL4 comprise an amino acid sequence having at least 80%, at least 85%, at least 90%, at least 91%, at least 92%, at least 93%, at least 94%, at least 95%, at least 96%, at least 97%, at least 98%, at least 99%, or 100% identity to SEQ ID NO:259; VL2 comprises an amino acid sequence having at least 80%, at least 85%, at least 90%, at least 91%, at least 92%, at least 93%, at least 94%, at least 95%, at least 96%, at least 97%, at least 98%, at least 99%, or 100% identity to SEQ ID NO:54; and VL3 comprises an amino acid sequence having at least 80%, at least 85%, at least 90%, at least 91%, at least 92%, at least 93%, at least 94%, at least 95%, at least 96%, at least 97%, at least 98%, at least 99%, or 100% identity to SEQ ID NO:275. In some aspects, VH1 and VH4 comprise the amino acid sequence of SEQ ID NO:263; VH2 comprises the amino acid sequence of SEQ ID NO:58; VH3 comprises the amino acid sequence of SEQ ID NO:279; VL1 and VL4 comprise the amino acid sequence of SEQ ID NO:259; VL2 comprises the amino acid sequence of SEQ ID NO:54; and VL3 comprises the amino acid sequence of SEQ ID NO:275. In some aspects, L1-L16 comprise the amino acid sequence of any one of SEQ ID NOs:1-34, wherein SEQ ID NO:1 has the amino acid sequence of G, SEQ ID NO:2 has the amino acid sequence of A, SEQ ID NO:3 has the amino acid sequence of GSS and SEQ ID NO:4 has the amino acid sequence of ASG. In some aspects, L1 or L4 and L7 or L10 comprise the amino acid sequence of SEQ ID NO:6; L2 or L5 and L8 or L11 comprise the amino acid sequence of SEQ ID NO:27; and L3 or L6 and L9 or L12 comprise the amino acid sequence of SEQ ID NO:6. In some aspects, L1 or L5 and L9 or L13 comprise the amino acid sequence of SEQ ID NO:6; L2 or L6 and L10 or L14 comprise the amino acid sequence of SEQ ID NO:27; L3 or L7 and L11 or L15 comprise the amino acid sequence of SEQ ID NO:6; and L4 or L8 and L12 or L16 comprise the amino acid sequence of SEQ ID NO:12. In some aspects, Fc comprises a knob-into-hole modification or Fc effector function knockout mutation. In some aspects, Fc comprises an amino acid sequence having at least 80%, at least 85%, at least 90%, at least 91%, at least 92%, at least 93%, at least 94%, at least 95%, at least 96%, at least 97%, at least 98%, at least 99%, or 100% identity to SEQ ID NO:293 or 294. In some aspects, Fc comprises the amino acid sequence of SEQ ID NO:293 or 294. In some aspects, the sequence has a mutation at N62, for example, N62Q or N62Q at, for example, SEQ ID NO:279. In some preferred aspects, VH1, VH2, VH3, VH4, VL1, VL2, VL3 and VL4 have at least 90% identity with the corresponding amino acid sequences specified above, optionally with (i) an Fc having at least 90% identity with the corresponding amino acid sequence recited above; (ii) one or more linker sequence as specified above; and/or (iii) a mutation at N62 as recited above. In some particularly preferred aspects, VH1, VH2, VH3, VH4, VL1, VL2, VL3 and VL4 comprise or consist of the corresponding amino acid sequences specified above, optionally with (i) an Fc comprising or consisting of the corresponding amino acid sequence recited above; (ii) one or more linker sequence as specified above; and/or (iii) a mutation at N62 as recited above.

[0744] In some aspects, the first polypeptide comprises an amino acid sequence having at least 80%, at least 85%, at least 90%, at least 91%, at least 92%, at least 93%, at least 94%, at least 95%, at least 96%, at least 97%, at least 98%, at least 99%, or 100% identity to SEQ ID NO:357; and the second polypeptide comprises an amino acid sequence having at least 80%, at least 85%, at least 90%, at least 91%, at least 92%, at least 93%, at least 94%, at least 95%, at least 96%, at least 97%, at least 98%, at least 99%, or 100% identity to SEQ ID NO:359. In some aspects, the first polypeptide has at least 90% identity to SEQ ID NO:357 and the second polypeptide has at least 90% identity to SEQ ID NO:359. In some aspects, the first polypeptide comprises the amino acid sequence of SEQ ID NO:357; and the second polypeptide comprises the amino acid sequence of SEQ ID NO:359. In some aspects, the first polypeptide comprises an amino acid sequence encoded by a polynucleotide having at least 80%, at least 85%, at least 90%, at least 91%, at least 92%, at least 93%, at least 94%, at least 95%, at least 96%, at least 97%, at least 98%, at least 99%, or 100% identity to SEQ ID NO:358; and the second polypeptide comprises an amino acid sequence encoded by a polynucleotide having at least 80%, at least 85%, at least 90%, at least 91%, at least 92%, at least 93%, at least 94%, at least 95%, at least 96%, at least 97%, at least 98%, at least 99%, or 100% identity to SEQ ID NO:360. In some aspects, the first polypeptide comprises an amino acid sequence encoded by a polynucleotide having at least 90% identity to SEQ ID NO:358 and the second polypeptide comprises an amino acid sequence encoded by a polynucleotide having at least 90% identity to SEQ ID NO:360. In some aspects, the first polypeptide comprises an amino acid sequence encoded by the polynucleotide of SEQ ID NO:358; and the second polypeptide comprises an amino acid sequence encoded by the polynucleotide of SEQ ID NO:360.

[0745] In some aspects, VH1 and VH3 comprise an amino acid sequence having at least 80%, at least 85%, at least 90%, at least 91%, at least 92%, at least 93%, at least 94%, at least 95%, at least 96%, at least 97%, at least 98%, at least 99%, or 100% identity to SEQ ID NO:58; VH2 comprises an amino acid sequence having at least 80%, at least 85%, at least 90%, at least 91%, at least 92%, at least 93%, at least 94%, at least 95%, at least 96%, at least 97%, at least 98%, at least 99%, or 100% identity to SEQ ID NO:263; VH4 comprises an amino acid sequence having at least 80%, at least 85%, at least 90%, at least 91%, at least 92%, at least 93%, at least 94%, at least 95%, at least 96%, at least 97%, at least 98%, at least 99%, or 100% identity to SEQ ID NO:279; VL1 and VL3 comprise an amino acid sequence having at least 80%, at least 85%, at least 90%, at least 91%, at least 92%, at least 93%, at least 94%, at least 95%, at least 96%, at least 97%, at least 98%, at least 99%, or 100% identity to SEQ ID NO:54; VL2 comprises an amino acid sequence having at least 80%, at least 85%, at least 90%, at least 91%, at least 92%, at least 93%, at least 94%, at least 95%, at least 96%, at least 97%, at least 98%, at least 99%, or 100% identity to SEQ ID NO:259; and VL4 comprises an amino acid sequence having at least 80%, at least 85%, at least 90%, at least 91%, at least 92%, at least 93%, at least 94%, at least 95%, at least 96%, at least 97%, at least 98%, at least 99%, or 100% identity to SEQ ID NO:275. In some aspects, VH1 and VH3 comprise the amino acid sequence of SEQ ID NO:58; VH2 comprises the amino acid sequence of SEQ ID NO:263; VH4 comprises the amino acid sequence of SEQ ID NO:279; VL1 and VL3 comprise the amino acid sequence of SEQ ID NO:54; VL2 comprises the amino acid sequence of SEQ ID NO:259; and VL4 comprises the amino acid sequence of SEQ ID NO:275. In some aspects, L1-L16 comprise the amino acid sequence of any one of SEQ ID NOs:1-34, wherein SEQ ID NO:1 has the amino acid sequence of G, SEQ ID NO:2 has the amino acid sequence of A, SEQ ID NO:3 has the amino acid sequence of GSS and SEQ ID NO:4 has the amino acid sequence of ASG. In some aspects, L1 or L4 and L7 or L10 comprise the amino acid sequence of SEQ ID NO:6; L2 or L5 and L8 or L11 comprise the amino acid sequence of SEQ ID NO:27; and L3 or L6 and L9 or L12 comprise the amino acid sequence of SEQ ID NO:6. In some aspects, L1 or L5 and L9 or L13 comprise the amino acid sequence of SEQ ID NO:6; L2 or L6 and L10 or L14 comprise the amino acid sequence of SEQ ID NO:27; L3 or L7 and L11 or L15 comprise the amino acid sequence of SEQ ID NO:6; and L4 or L8 and L12 or L16 comprise the amino acid sequence of SEQ ID NO:12. In some aspects, Fc comprises a knob-into-hole modification or Fc effector function knockout mutation. In some aspects, Fc comprises an amino acid sequence having at least 80%, at least 85%, at least 90%, at least 91%, at least 92%, at least 93%, at least 94%, at least 95%, at least 96%, at least 97%, at least 98%, at least 99%, or 100% identity to SEQ ID NO:293 or 294. In some aspects, Fc comprises the amino acid sequence of SEQ ID NO:293 or 294. In some aspects, the sequence has a mutation at N62, for example, N62Q or N62Q at, for example, SEQ ID NO:279. In some preferred aspects, VH1, VH2, VH3, VH4, VL1, VL2, VL3 and VL4 have at least 90% identity with the corresponding amino acid sequences specified above, optionally with (i) an Fc having at least 90% identity with the corresponding amino acid sequence recited above; (ii) one or more linker sequence as specified above; and/or (iii) a mutation at N62 as recited above. In some particularly preferred aspects, VH1, VH2, VH3, VH4, VL1, VL2, VL3 and VL4 comprise or consist of the corresponding amino acid sequences specified above, optionally with (i) an Fc comprising or consisting of the corresponding amino acid sequence recited above; (ii) one or more linker sequence as specified above; and/or (iii) a mutation at N62 as recited above.

[0746] In some aspects, the first polypeptide comprises an amino acid sequence having at least 80%, at least 85%, at least 90%, at least 91%, at least 92%, at least 93%, at least 94%, at least 95%, at least 96%, at least 97%, at least 98%, at least 99%, or 100% identity to SEQ ID NO:361; and the second polypeptide comprises an amino acid sequence having at least 80%, at least 85%, at least 90%, at least 91%, at least 92%, at least 93%, at least 94%, at least 95%, at least 96%, at least 97%, at least 98%, at least 99%, or 100% identity to SEQ ID NO:363. In some aspects, the first polypeptide has at least 90% identity to SEQ ID NO:361 and the second polypeptide has at least 90% identity to SEQ ID NO:363. In some aspects, the first polypeptide comprises the amino acid sequence of SEQ ID NO:361; and the second polypeptide comprises the amino acid sequence of SEQ ID NO:363. In some aspects, the first polypeptide comprises an amino acid sequence encoded by a polynucleotide having at least 80%, at least 85%, at least 90%, at least 91%, at least 92%, at least 93%, at least 94%, at least 95%, at least 96%, at least 97%, at least 98%, at least 99%, or 100% identity to SEQ ID NO:362; and the second polypeptide comprises an amino acid sequence encoded by a polynucleotide having at least 80%, at least 85%, at least 90%, at least 91%, at least 92%, at least 93%, at least 94%, at least 95%, at least 96%, at least 97%, at least 98%, at least 99%, or 100% identity to SEQ ID NO:364. In some aspects, the first polypeptide comprises an amino acid sequence encoded by a polynucleotide having at least 90% identity to SEQ ID NO:362 and the second polypeptide comprises an amino acid sequence encoded by a polynucleotide having at least 90% identity to SEQ ID NO:364. In some aspects, the first polypeptide comprises an amino acid sequence encoded by the polynucleotide of SEQ ID NO:362; and the second polypeptide comprises an amino acid sequence encoded by the polynucleotide of SEQ ID NO:364.

[0747] In some aspects, VH1 and VH4 comprise an amino acid sequence having at least 80%, at least 85%, at least 90%, at least 91%, at least 92%, at least 93%, at least 94%, at least 95%, at least 96%, at least 97%, at least 98%, at least 99%, or 100% identity to SEQ ID NO:58; VH2 comprises an amino acid sequence having at least 80%, at least 85%, at least 90%, at least 91%, at least 92%, at least 93%, at least 94%, at least 95%, at least 96%, at least 97%, at least 98%, at least 99%, or 100% identity to SEQ ID NO:263; VH3 comprises an amino acid sequence having at least 80%, at least 85%, at least 90%, at least 91%, at least 92%, at least 93%, at least 94%, at least 95%, at least 96%, at least 97%, at least 98%, at least 99%, or 100% identity to SEQ ID NO:279; VL1 and VL4 comprise an amino acid sequence having at least 80%, at least 85%, at least 90%, at least 91%, at least 92%, at least 93%, at least 94%, at least 95%, at least 96%, at least 97%, at least 98%, at least 99%, or 100% identity to SEQ ID NO:54; VL2 comprises an amino acid sequence having at least 80%, at least 85%, at least 90%, at least 91%, at least 92%, at least 93%, at least 94%, at least 95%, at least 96%, at least 97%, at least 98%, at least 99%, or 100% identity to SEQ ID NO:259; and VL3 comprises an amino acid sequence having at least 80%, at least 85%, at least 90%, at least 91%, at least 92%, at least 93%, at least 94%, at least 95%, at least 96%, at least 97%, at least 98%, at least 99%, or 100% identity to SEQ ID NO:275. In some aspects, VH1 and VH4 comprise the amino acid sequence of SEQ ID NO:58; VH2 comprises the amino acid sequence of SEQ ID NO:263; VH3 comprises the amino acid sequence of SEQ ID NO:279; VL1 and VL4 comprise the amino acid sequence of SEQ ID NO:54; VL2 comprises the amino acid sequence of SEQ ID NO:259; and VL3 comprises the amino acid sequence of SEQ ID NO:275. In some aspects, L1-L16 comprise the amino acid sequence of any one of SEQ ID NOs:1-34, wherein SEQ ID NO:1 has the amino acid sequence of G, SEQ ID NO:2 has the amino acid sequence of A, SEQ ID NO:3 has the amino acid sequence of GSS and SEQ ID NO:4 has the amino acid sequence of ASG. In some aspects, L1 or L4 and L7 or L10 comprise the amino acid sequence of SEQ ID NO:6; L2 or L5 and L8 or L11 comprise the amino acid sequence of SEQ ID NO:27; and L3 or L6 and L9 or L12 comprise the amino acid sequence of SEQ ID NO:6. In some aspects, L1 or L5 and L9 or L13 comprise the amino acid sequence of SEQ ID NO:6; L2 or L6 and L10 or L14 comprise the amino acid sequence of SEQ ID NO:27; L3 or L7 and L11 or L15 comprise the amino acid sequence of SEQ ID NO:6; and L4 or L8 and L12 or L16 comprise the amino acid sequence of SEQ ID NO:12. In some aspects, Fc comprises a knob-into-hole modification or Fc effector function knockout mutation. In some aspects, Fc comprises an amino acid sequence having at least 80%, at least 85%, at least 90%, at least 91%, at least 92%, at least 93%, at least 94%, at least 95%, at least 96%, at least 97%, at least 98%, at least 99%, or 100% identity to SEQ ID NO:293 or 294. In some aspects, Fc comprises the amino acid sequence of SEQ ID NO:293 or 294. In some aspects, the sequence has a mutation at N62, for example, N62Q or N62Q at, for example, SEQ ID NO:279. In some preferred aspects, VH1, VH2, VH3, VH4, VL1, VL2, VL3 and VL4 have at least 90% identity with the corresponding amino acid sequences specified above, optionally with (i) an Fc having at least 90% identity with the corresponding amino acid sequence recited above; (ii) one or more linker sequence as specified above; and/or (iii) a mutation at N62 as recited above. In some particularly preferred aspects, VH1, VH2, VH3, VH4, VL1, VL2, VL3 and VL4 comprise or consist of the corresponding amino acid sequences specified above, optionally with (i) an Fc comprising or consisting of the corresponding amino acid sequence recited above; (ii) one or more linker sequence as specified above; and/or (iii) a mutation at N62 as recited above.

[0748] In some aspects, the first polypeptide comprises an amino acid sequence having at least 80%, at least 85%, at least 90%, at least 91%, at least 92%, at least 93%, at least 94%, at least 95%, at least 96%, at least 97%, at least 98%, at least 99%, or 100% identity to SEQ ID NO:365; and the second polypeptide comprises an amino acid sequence having at least 80%, at least 85%, at least 90%, at least 91%, at least 92%, at least 93%, at least 94%, at least 95%, at least 96%, at least 97%, at least 98%, at least 99%, or 100% identity to SEQ ID NO:367. In some aspects, the first polypeptide has at least 90% identity to SEQ ID NO:365 and the second polypeptide has at least 90% identity to SEQ ID NO:367. In some aspects, the first polypeptide comprises the amino acid sequence of SEQ ID NO:365; and the second polypeptide comprises the amino acid sequence of SEQ ID NO:367. In some aspects, the first polypeptide comprises an amino acid sequence encoded by a polynucleotide having at least 80%, at least 85%, at least 90%, at least 91%, at least 92%, at least 93%, at least 94%, at least 95%, at least 96%, at least 97%, at least 98%, at least 99%, or 100% identity to SEQ ID NO:366; and the second polypeptide comprises an amino acid sequence encoded by a polynucleotide having at least 80%, at least 85%, at least 90%, at least 91%, at least 92%, at least 93%, at least 94%, at least 95%, at least 96%, at least 97%, at least 98%, at least 99%, or 100% identity to SEQ ID NO:368. In some aspects, the first polypeptide comprises an amino acid sequence encoded by a polynucleotide having at least 90% identity to SEQ ID NO:366 and the second polypeptide comprises an amino acid sequence encoded by a polynucleotide having at least 90% identity to SEQ ID NO:368. In some aspects, the first polypeptide comprises an amino acid sequence encoded by the polynucleotide of SEQ ID NO:366; and the second polypeptide comprises an amino acid sequence encoded by the polynucleotide of SEQ ID NO:368.

[0749] In some aspects, VH1 comprises an amino acid sequence having at least 80%, at least 85%, at least 90%, at least 91%, at least 92%, at least 93%, at least 94%, at least 95%, at least 96%, at least 97%, at least 98%, at least 99%, or 100% identity to SEQ ID NO:263; VH2 and VH3 comprise an amino acid sequence having at least 80%, at least 85%, at least 90%, at least 91%, at least 92%, at least 93%, at least 94%, at least 95%, at least 96%, at least 97%, at least 98%, at least 99%, or 100% identity to SEQ ID NO:58; VH4 comprises an amino acid sequence having at least 80%, at least 85%, at least 90%, at least 91%, at least 92%, at least 93%, at least 94%, at least 95%, at least 96%, at least 97%, at least 98%, at least 99%, or 100% identity to SEQ ID NO:279; VL1 comprises an amino acid sequence having at least 80%, at least 85%, at least 90%, at least 91%, at least 92%, at least 93%, at least 94%, at least 95%, at least 96%, at least 97%, at least 98%, at least 99%, or 100% identity to SEQ ID NO:259; VL2 and VL3 comprise an amino acid sequence having at least 80%, at least 85%, at least 90%, at least 91%, at least 92%, at least 93%, at least 94%, at least 95%, at least 96%, at least 97%, at least 98%, at least 99%, or 100% identity to SEQ ID NO:54; and VL4 comprises an amino acid sequence having at least 80%, at least 85%, at least 90%, at least 91%, at least 92%, at least 93%, at least 94%, at least 95%, at least 96%, at least 97%, at least 98%, at least 99%, or 100% identity to SEQ ID NO:275. In some aspects, VH1 comprises the amino acid sequence of SEQ ID NO:263; VH2 and VH3 comprise the amino acid sequence of SEQ ID NO:58; VH4 comprises the amino acid sequence of SEQ ID NO:279; VL1 comprises the amino acid sequence of SEQ ID NO:259; VL2 and VL3 comprise the amino acid sequence of SEQ ID NO:54; and VL4 comprises the amino acid sequence of SEQ ID NO:275. In some aspects, L1-L16 comprise the amino acid sequence of any one of SEQ ID NOs:1-34, wherein SEQ ID NO:1 has the amino acid sequence of G, SEQ ID NO:2 has the amino acid sequence of A, SEQ ID NO:3 has the amino acid sequence of GSS and SEQ ID NO:4 has the amino acid sequence of ASG. In some aspects, L1 or L4 and L7 or L10 comprise the amino acid sequence of SEQ ID NO:6; L2 or L5 and L8 or L11 comprise the amino acid sequence of SEQ ID NO:27; and L3 or L6 and L9 or L12 comprise the amino acid sequence of SEQ ID NO:6. In some aspects, L1 or L5 and L9 or L13 comprise the amino acid sequence of SEQ ID NO:6; L2 or L6 and L10 or L14 comprise the amino acid sequence of SEQ ID NO:27; L3 or L7 and L11 or L15 comprise the amino acid sequence of SEQ ID NO:6; and L4 or L8 and L12 or L16 comprise the amino acid sequence of SEQ ID NO:12. In some aspects, Fc comprises a knob-into-hole modification or Fc effector function knockout mutation. In some aspects, Fc comprises an amino acid sequence having at least 80%, at least 85%, at least 90%, at least 91%, at least 92%, at least 93%, at least 94%, at least 95%, at least 96%, at least 97%, at least 98%, at least 99%, or 100% identity to SEQ ID NO:293 or 294. In some aspects, Fc comprises the amino acid sequence of SEQ ID NO:293 or 294. In some aspects, the sequence has a mutation at N62, for example, N62Q or N62Q at, for example, SEQ ID NO:279. In some preferred aspects, VH1, VH2, VH3, VH4, VL1, VL2, VL3 and VL4 have at least 90% identity with the corresponding amino acid sequences specified above, optionally with (i) an Fc having at least 90% identity with the corresponding amino acid sequence recited above; (ii) one or more linker sequence as specified above and/or (iii) a mutation at N62 as recited above. In some particularly preferred aspects, VH1, VH2, VH3, VH4, VL1, VL2, VL3 and VL4 comprise or consist of the corresponding amino acid sequences specified above, optionally with (i) an Fc comprising or consisting of the corresponding amino acid sequence recited above; (ii) one or more linker sequence as specified above; and/or (iii) a mutation at N62 as recited above.

[0750] In some aspects, the first polypeptide comprises an amino acid sequence having at least 80%, at least 85%, at least 90%, at least 91%, at least 92%, at least 93%, at least 94%, at least 95%, at least 96%, at least 97%, at least 98%, at least 99%, or 100% identity to SEQ ID NO:369; and the second polypeptide comprises an amino acid sequence having at least 80%, at least 85%, at least 90%, at least 91%, at least 92%, at least 93%, at least 94%, at least 95%, at least 96%, at least 97%, at least 98%, at least 99%, or 100% identity to SEQ ID NO:371. In some aspects, the first polypeptide comprises the amino acid sequence of SEQ ID NO:369; and the second polypeptide comprises the amino acid sequence of SEQ ID NO:371. In some aspects, the first polypeptide has at least 90% identity to SEQ ID NO:369 and the second polypeptide has at least 90% identity to SEQ ID NO:371. In some aspects, the first polypeptide comprises an amino acid sequence encoded by a polynucleotide having at least 80%, at least 85%, at least 90%, at least 91%, at least 92%, at least 93%, at least 94%, at least 95%, at least 96%, at least 97%, at least 98%, at least 99%, or 100% identity to SEQ ID NO:370; and the second polypeptide comprises an amino acid sequence encoded by a polynucleotide having at least 80%, at least 85%, at least 90%, at least 91%, at least 92%, at least 93%, at least 94%, at least 95%, at least 96%, at least 97%, at least 98%, at least 99%, or 100% identity to SEQ ID NO:372. In some aspects, the first polypeptide comprises an amino acid sequence encoded by a polynucleotide having at least 90% identity to SEQ ID NO:370 and the second polypeptide comprises an amino acid sequence encoded by a polynucleotide having at least 90% identity to SEQ ID NO:372. In some aspects, the first polypeptide comprises an amino acid sequence encoded by the polynucleotide of SEQ ID NO:370; and the second polypeptide comprises an amino acid sequence encoded by the polynucleotide of SEQ ID NO:372.

[0751] In some aspects, VH1 comprises an amino acid sequence having at least 80%, at least 85%, at least 90%, at least 91%, at least 92%, at least 93%, at least 94%, at least 95%, at least 96%, at least 97%, at least 98%, at least 99%, or 100% identity to SEQ ID NO:263; VH2 and VH4 comprise an amino acid sequence having at least 80%, at least 85%, at least 90%, at least 91%, at least 92%, at least 93%, at least 94%, at least 95%, at least 96%, at least 97%, at least 98%, at least 99%, or 100% identity to SEQ ID NO:58; VH3 comprises an amino acid sequence having at least 80%, at least 85%, at least 90%, at least 91%, at least 92%, at least 93%, at least 94%, at least 95%, at least 96%, at least 97%, at least 98%, at least 99%, or 100% identity to SEQ ID NO:279; VL1 comprises an amino acid sequence having at least 80%, at least 85%, at least 90%, at least 91%, at least 92%, at least 93%, at least 94%, at least 95%, at least 96%, at least 97%, at least 98%, at least 99%, or 100% identity to SEQ ID NO:259; VL2 and VL4 comprise an amino acid sequence having at least 80%, at least 85%, at least 90%, at least 91%, at least 92%, at least 93%, at least 94%, at least 95%, at least 96%, at least 97%, at least 98%, at least 99%, or 100% identity to SEQ ID NO:54; and VL3 comprises an amino acid sequence having at least 80%, at least 85%, at least 90%, at least 91%, at least 92%, at least 93%, at least 94%, at least 95%, at least 96%, at least 97%, at least 98%, at least 99%, or 100% identity to SEQ ID NO:275. In some aspects, VH1 comprises the amino acid sequence of SEQ ID NO:263; VH2 and VH4 comprise the amino acid sequence of SEQ ID NO:58; VH3 comprises the amino acid sequence of SEQ ID NO:279; VL1 comprises the amino acid sequence of SEQ ID NO:259; VL2 and VL4 comprise the amino acid sequence of SEQ ID NO:54; and VL3 comprises the amino acid sequence of SEQ ID NO:275. In some aspects, L1-L16 comprise the amino acid sequence of any one of SEQ ID NOs:1-34, wherein SEQ ID NO:1 has the amino acid sequence of G, SEQ ID NO:2 has the amino acid sequence of A, SEQ ID NO:3 has the amino acid sequence of GSS and SEQ ID NO:4 has the amino acid sequence of ASG. In some aspects, L1 or L4 and L7 or L10 comprise the amino acid sequence of SEQ ID NO:6; L2 or L5 and L8 or L11 comprise the amino acid sequence of SEQ ID NO:27; and L3 or L6 and L9 or L12 comprise the amino acid sequence of SEQ ID NO:6. In some aspects, L1 or L5 and L9 or L13 comprise the amino acid sequence of SEQ ID NO:6; L2 or L6 and L10 or L14 comprise the amino acid sequence of SEQ ID NO:27; L3 or L7 and L11 or L15 comprise the amino acid sequence of SEQ ID NO:6; and L4 or L8 and L12 or L16 comprise the amino acid sequence of SEQ ID NO:12. In some aspects, Fc comprises a knob-into-hole modification or Fc effector function knockout mutation. In some aspects, Fc comprises an amino acid sequence having at least 80%, at least 85%, at least 90%, at least 91%, at least 92%, at least 93%, at least 94%, at least 95%, at least 96%, at least 97%, at least 98%, at least 99%, or 100% identity to SEQ ID NO:293 or 294. In some aspects, Fc comprises the amino acid sequence of SEQ ID NO:293 or 294. In some aspects, the sequence has a mutation at N62, for example, N62Q or N62Q at, for example, SEQ ID NO:279. In some preferred aspects, VH1, VH2, VH3, VH4, VL1, VL2, VL3 and VL4 have at least 90% identity with the corresponding amino acid sequences specified above, optionally with (i) an Fc having at least 90% identity with the corresponding amino acid sequence recited above; (ii) one or more linker sequence as specified above; and/or (iii) a mutation at N62 as recited above. In some particularly preferred aspects, VH1, VH2, VH3, VH4, VL1, VL2, VL3 and VL4 comprise or consist of the corresponding amino acid sequences specified above, optionally with (i) an Fc comprising or consisting of the corresponding amino acid sequence recited above; (ii) one or more linker sequence as specified above; and/or (iii) a mutation at N62 as recited above.

[0752] In some aspects, the first polypeptide comprises an amino acid sequence having at least 80%, at least 85%, at least 90%, at least 91%, at least 92%, at least 93%, at least 94%, at least 95%, at least 96%, at least 97%, at least 98%, at least 99%, or 100% identity to SEQ ID NO:373; and the second polypeptide comprises an amino acid sequence having at least 80%, at least 85%, at least 90%, at least 91%, at least 92%, at least 93%, at least 94%, at least 95%, at least 96%, at least 97%, at least 98%, at least 99%, or 100% identity to SEQ ID NO:375. In some aspects, the first polypeptide has at least 90% identity to SEQ ID NO:373 and the second polypeptide has at least 90% identity to SEQ ID NO:375. In some aspects, the first polypeptide comprises the amino acid sequence of SEQ ID NO:373; and the second polypeptide comprises the amino acid sequence of SEQ ID NO:375. In some aspects, the first polypeptide comprises an amino acid sequence encoded by a polynucleotide having at least 80%, at least 85%, at least 90%, at least 91%, at least 92%, at least 93%, at least 94%, at least 95%, at least 96%, at least 97%, at least 98%, at least 99%, or 100% identity to SEQ ID NO:374; and the second polypeptide comprises an amino acid sequence encoded by a polynucleotide having at least 80%, at least 85%, at least 90%, at least 91%, at least 92%, at least 93%, at least 94%, at least 95%, at least 96%, at least 97%, at least 98%, at least 99%, or 100% identity to SEQ ID NO:376. In some aspects, the first polypeptide comprises an amino acid sequence encoded by a polynucleotide having at least 90% identity to SEQ ID NO:374 and the second polypeptide comprises an amino acid sequence encoded by a polynucleotide having at least 90% identity to SEQ ID NO:376. In some aspects, the first polypeptide comprises an amino acid sequence encoded by the polynucleotide of SEQ ID NO:374; and the second polypeptide comprises an amino acid sequence encoded by the polynucleotide of SEQ ID NO:376.

[0753] In some aspects, VH1 comprises an amino acid sequence having at least 80%, at least 85%, at least 90%, at least 91%, at least 92%, at least 93%, at least 94%, at least 95%, at least 96%, at least 97%, at least 98%, at least 99%, or 100% identity to SEQ ID NO:263; VH2 and VH3 comprise an amino acid sequence having at least 80%, at least 85%, at least 90%, at least 91%, at least 92%, at least 93%, at least 94%, at least 95%, at least 96%, at least 97%, at least 98%, at least 99%, or 100% identity to SEQ ID NO:279; VH4 comprises an amino acid sequence having at least 80%, at least 85%, at least 90%, at least 91%, at least 92%, at least 93%, at least 94%, at least 95%, at least 96%, at least 97%, at least 98%, at least 99%, or 100% identity to SEQ ID NO:58; VL1 comprises an amino acid sequence having at least 80%, at least 85%, at least 90%, at least 91%, at least 92%, at least 93%, at least 94%, at least 95%, at least 96%, at least 97%, at least 98%, at least 99%, or 100% identity to SEQ ID NO:259; VL2 and VL3 comprise an amino acid sequence having at least 80%, at least 85%, at least 90%, at least 91%, at least 92%, at least 93%, at least 94%, at least 95%, at least 96%, at least 97%, at least 98%, at least 99%, or 100% identity to SEQ ID NO:275; and VL4 comprises an amino acid sequence having at least 80%, at least 85%, at least 90%, at least 91%, at least 92%, at least 93%, at least 94%, at least 95%, at least 96%, at least 97%, at least 98%, at least 99%, or 100% identity to SEQ ID NO:54. In some aspects, VH1 comprises the amino acid sequence of SEQ ID NO:263; VH2 and VH3 comprise the amino acid sequence of SEQ ID NO:279; VH4 comprises the amino acid sequence of SEQ ID NO:58; VL1 comprises the amino acid sequence of SEQ ID NO:259; VL2 and VL3 comprise the amino acid sequence of SEQ ID NO:275; and VL4 comprises the amino acid sequence of SEQ ID NO:54. In some aspects, L1-L16 comprise the amino acid sequence of any one of SEQ ID NOs:1-34, wherein SEQ ID NO:1 has the amino acid sequence of G, SEQ ID NO:2 has the amino acid sequence of A, SEQ ID NO:3 has the amino acid sequence of GSS and SEQ ID NO:4 has the amino acid sequence of ASG. In some aspects, L1 or L4 and L7 or L10 comprise the amino acid sequence of SEQ ID NO:6; L2 or L5 and L8 or L11 comprise the amino acid sequence of SEQ ID NO:27; and L3 or L6 and L9 or L12 comprise the amino acid sequence of SEQ ID NO:6. In some aspects, L1 or L5 and L9 or L13 comprise the amino acid sequence of SEQ ID NO:6; L2 or L6 and L10 or L14 comprise the amino acid sequence of SEQ ID NO:27; L3 or L7 and L11 or L15 comprise the amino acid sequence of SEQ ID NO:6; and L4 or L8 and L12 or L16 comprise the amino acid sequence of SEQ ID NO:12. In some aspects, Fc comprises a knob-into-hole modification or Fc effector function knockout mutation. In some aspects, Fc comprises an amino acid sequence having at least 80%, at least 85%, at least 90%, at least 91%, at least 92%, at least 93%, at least 94%, at least 95%, at least 96%, at least 97%, at least 98%, at least 99%, or 100% identity to SEQ ID NO:293 or 294. In some aspects, Fc comprises the amino acid sequence of SEQ ID NO:293 or 294. In some aspects, the sequence has a mutation at N62, for example, N62Q or N62Q at, for example, SEQ ID NO:279. In some preferred aspects, VH1, VH2, VH3, VH4, VL1, VL2, VL3 and VL4 have at least 90% identity with the corresponding amino acid sequences specified above, optionally with (i) an Fc having at least 90% identity with the corresponding amino acid sequence recited above; (ii) one or more linker sequence as specified above; and/or (iii) a mutation at N62 as recited above. In some particularly preferred aspects, VH1, VH2, VH3, VH4, VL1, VL2, VL3 and VL4 comprise or consist of the corresponding amino acid sequences specified above, optionally with (i) an Fc comprising or consisting of the corresponding amino acid sequence recited above; (ii) one or more linker sequence as specified above; and/or (iii) a mutation at N62 as recited above.

[0754] In some aspects, the first polypeptide comprises an amino acid sequence having at least 80%, at least 85%, at least 90%, at least 91%, at least 92%, at least 93%, at least 94%, at least 95%, at least 96%, at least 97%, at least 98%, at least 99%, or 100% identity to SEQ ID NO:377; and the second polypeptide comprises an amino acid sequence having at least 80%, at least 85%, at least 90%, at least 91%, at least 92%, at least 93%, at least 94%, at least 95%, at least 96%, at least 97%, at least 98%, at least 99%, or 100% identity to SEQ ID NO:379. In some aspects, the first polypeptide has at least 90% identity to SEQ ID NO:377 and the second polypeptide has at least 90% identity to SEQ ID NO:379. In some aspects, the first polypeptide comprises the amino acid sequence of SEQ ID NO:377; and the second polypeptide comprises the amino acid sequence of SEQ ID NO:379. In some aspects, the first polypeptide comprises an amino acid sequence encoded by a polynucleotide having at least 80%, at least 85%, at least 90%, at least 91%, at least 92%, at least 93%, at least 94%, at least 95%, at least 96%, at least 97%, at least 98%, at least 99%, or 100% identity to SEQ ID NO:378; and the second polypeptide comprises an amino acid sequence encoded by a polynucleotide having at least 80%, at least 85%, at least 90%, at least 91%, at least 92%, at least 93%, at least 94%, at least 95%, at least 96%, at least 97%, at least 98%, at least 99%, or 100% identity to SEQ ID NO:380. In some aspects, the first polypeptide comprises an amino acid sequence encoded by a polynucleotide having at least 90% identity to SEQ ID NO:378 and the second polypeptide comprises an amino acid sequence encoded by a polynucleotide having at least 90% identity to SEQ ID NO:380. In some aspects, the first polypeptide comprises an amino acid sequence encoded by the polynucleotide of SEQ ID NO:378; and the second polypeptide comprises an amino acid sequence encoded by the polynucleotide of SEQ ID NO:380.

[0755] In some aspects, VH1 and VH3 comprise an amino acid sequence having at least 80%, at least 85%, at least 90%, at least 91%, at least 92%, at least 93%, at least 94%, at least 95%, at least 96%, at least 97%, at least 98%, at least 99%, or 100% identity to SEQ ID NO:279; VH2 comprises an amino acid sequence having at least 80%, at least 85%, at least 90%, at least 91%, at least 92%, at least 93%, at least 94%, at least 95%, at least 96%, at least 97%, at least 98%, at least 99%, or 100% identity to SEQ ID NO:263; VH4 comprises an amino acid sequence having at least 80%, at least 85%, at least 90%, at least 91%, at least 92%, at least 93%, at least 94%, at least 95%, at least 96%, at least 97%, at least 98%, at least 99%, or 100% identity to SEQ ID NO:58; VL1 and VL3 comprise an amino acid sequence having at least 80%, at least 85%, at least 90%, at least 91%, at least 92%, at least 93%, at least 94%, at least 95%, at least 96%, at least 97%, at least 98%, at least 99%, or 100% identity to SEQ ID NO:275; VL2 comprises an amino acid sequence having at least 80%, at least 85%, at least 90%, at least 91%, at least 92%, at least 93%, at least 94%, at least 95%, at least 96%, at least 97%, at least 98%, at least 99%, or 100% identity to SEQ ID NO:259; and VL4 comprises an amino acid sequence having at least 80%, at least 85%, at least 90%, at least 91%, at least 92%, at least 93%, at least 94%, at least 95%, at least 96%, at least 97%, at least 98%, at least 99%, or 100% identity to SEQ ID NO:54. In some aspects, VH1 and VH3 comprise the amino acid sequence of SEQ ID NO:279; VH2 comprises the amino acid sequence of SEQ ID NO:263; VH4 comprises the amino acid sequence of SEQ ID NO:58; VL1 and VL3 comprise the amino acid sequence of SEQ ID NO:275; VL2 comprises the amino acid sequence of SEQ ID NO:259; and VL4 comprises the amino acid sequence of SEQ ID NO:54. In some aspects, L1-L16 comprise the amino acid sequence of any one of SEQ ID NOs:1-34, wherein SEQ ID NO:1 has the amino acid sequence of G, SEQ ID NO:2 has the amino acid sequence of A, SEQ ID NO:3 has the amino acid sequence of GSS and SEQ ID NO:4 has the amino acid sequence of ASG. In some aspects, L1 or L4 and L7 or L10 comprise the amino acid sequence of SEQ ID NO:6; L2 or L5 and L8 or L11 comprise the amino acid sequence of SEQ ID NO:27; and L3 or L6 and L9 or L12 comprise the amino acid sequence of SEQ ID NO:6. In some aspects, L1 or L5 and L9 or L13 comprise the amino acid sequence of SEQ ID NO:6; L2 or L6 and L10 or L14 comprise the amino acid sequence of SEQ ID NO:27; L3 or L7 and L11 or L15 comprise the amino acid sequence of SEQ ID NO:6; and L4 or L8 and L12 or L16 comprise the amino acid sequence of SEQ ID NO:12. In some aspects, Fc comprises a knob-into-hole modification or Fe effector function knockout mutation. In some aspects, Fc comprises an amino acid sequence having at least 80%, at least 85%, at least 90%, at least 91%, at least 92%, at least 93%, at least 94%, at least 95%, at least 96%, at least 97%, at least 98%, at least 99%, or 100% identity to SEQ ID NO:293 or 294. In some aspects, Fc comprises the amino acid sequence of SEQ ID NO:293 or 294. In some aspects, the sequence has a mutation at N62, for example, N62Q or N62Q at, for example, SEQ ID NO:279. In some preferred aspects, VH1, VH2, VH3, VH4, VL1, VL2, VL3 and VL4 have at least 90% identity with the corresponding amino acid sequences specified above, optionally with (i) an Fc having at least 90% identity with the corresponding amino acid sequence recited above; (ii) one or more linker sequence as specified above; and/or (iii) a mutation at N62 as recited above. In some particularly preferred aspects, VH1, VH2, VH3, VH4, VL1, VL2, VL3 and VL4 comprise or consist of the corresponding amino acid sequences specified above, optionally with (i) an Fc comprising or consisting of the corresponding amino acid sequence recited above; (ii) one or more linker sequence as specified above; and/or (iii) a mutation at N62 as recited above.

[0756] In some aspects, the first polypeptide comprises an amino acid sequence having at least 80%, at least 85%, at least 90%, at least 91%, at least 92%, at least 93%, at least 94%, at least 95%, at least 96%, at least 97%, at least 98%, at least 99%, or 100% identity to SEQ ID NO:381; and the second polypeptide comprises an amino acid sequence having at least 80%, at least 85%, at least 90%, at least 91%, at least 92%, at least 93%, at least 94%, at least 95%, at least 96%, at least 97%, at least 98%, at least 99%, or 100% identity to SEQ ID NO:383. In some aspects, the first polypeptide has at least 90% identity to SEQ ID NO:381 and the second polypeptide has at least 90% identity to SEQ ID NO:383. In some aspects, the first polypeptide comprises the amino acid sequence of SEQ ID NO:381; and the second polypeptide comprises the amino acid sequence of SEQ ID NO:383. In some aspects, the first polypeptide comprises an amino acid sequence encoded by a polynucleotide having at least 80%, at least 85%, at least 90%, at least 91%, at least 92%, at least 93%, at least 94%, at least 95%, at least 96%, at least 97%, at least 98%, at least 99%, or 100% identity to SEQ ID NO:382; and the second polypeptide comprises an amino acid sequence encoded by a polynucleotide having at least 80%, at least 85%, at least 90%, at least 91%, at least 92%, at least 93%, at least 94%, at least 95%, at least 96%, at least 97%, at least 98%, at least 99%, or 100% identity to SEQ ID NO:384. In some aspects, the first polypeptide comprises an amino acid sequence encoded by a polynucleotide having at least 90% identity to SEQ ID NO:382 and the second polypeptide comprises an amino acid sequence encoded by a polynucleotide having at least 90% identity to SEQ ID NO:384. In some aspects, the first polypeptide comprises an amino acid sequence encoded by the polynucleotide of SEQ ID NO:382; and the second polypeptide comprises an amino acid sequence encoded by the polynucleotide of SEQ ID NO:384.

[0757] In some aspects, VH1 comprises an amino acid sequence having at least 80%, at least 85%, at least 90%, at least 91%, at least 92%, at least 93%, at least 94%, at least 95%, at least 96%, at least 97%, at least 98%, at least 99%, or 100% identity to SEQ ID NO:58; VH2 and VH4 comprise an amino acid sequence having at least 80%, at least 85%, at least 90%, at least 91%, at least 92%, at least 93%, at least 94%, at least 95%, at least 96%, at least 97%, at least 98%, at least 99%, or 100% identity to SEQ ID NO:279; VH3 comprises an amino acid sequence having at least 80%, at least 85%, at least 90%, at least 91%, at least 92%, at least 93%, at least 94%, at least 95%, at least 96%, at least 97%, at least 98%, at least 99%, or 100% identity to SEQ ID NO:263; VL1 comprises an amino acid sequence having at least 80%, at least 85%, at least 90%, at least 91%, at least 92%, at least 93%, at least 94%, at least 95%, at least 96%, at least 97%, at least 98%, at least 99%, or 100% identity to SEQ ID NO:54; VL2 and VL4 comprise an amino acid sequence having at least 80%, at least 85%, at least 90%, at least 91%, at least 92%, at least 93%, at least 94%, at least 95%, at least 96%, at least 97%, at least 98%, at least 99%, or 100% identity to SEQ ID NO:275; and VL3 comprises an amino acid sequence having at least 80%, at least 85%, at least 90%, at least 91%, at least 92%, at least 93%, at least 94%, at least 95%, at least 96%, at least 97%, at least 98%, at least 99%, or 100% identity to SEQ ID NO:259. In some aspects, VH1 comprises the amino acid sequence of SEQ ID NO:58; VH2 and VH4 comprise the amino acid sequence of SEQ ID NO:279; VH3 comprises the amino acid sequence of SEQ ID NO:263; VL1 comprises the amino acid sequence of SEQ ID NO:54; VL2 and VL4 comprise the amino acid sequence of SEQ ID NO:275; and VL3 comprises the amino acid sequence of SEQ ID NO:259. In some aspects, L1-L16 comprise the amino acid sequence of any one of SEQ ID NOs:1-34, wherein SEQ ID NO:1 has the amino acid sequence of G, SEQ ID NO:2 has the amino acid sequence of A, SEQ ID NO:3 has the amino acid sequence of GSS and SEQ ID NO:4 has the amino acid sequence of ASG. In some aspects, L1 or L4 and L7 or L10 comprise the amino acid sequence of SEQ ID NO:6; L2 or L5 and L8 or L11 comprise the amino acid sequence of SEQ ID NO:27; and L3 or L6 and L9 or L12 comprise the amino acid sequence of SEQ ID NO:6. In some aspects, L1 or L5 and L9 or L13 comprise the amino acid sequence of SEQ ID NO:6; L2 or L6 and L10 or L14 comprise the amino acid sequence of SEQ ID NO:27; L3 or L7 and L11 or L15 comprise the amino acid sequence of SEQ ID NO:6; and L4 or L8 and L12 or L16 comprise the amino acid sequence of SEQ ID NO:12. In some aspects, Fc comprises a knob-into-hole modification or Fc effector function knockout mutation. In some aspects, Fc comprises an amino acid sequence having at least 80%, at least 85%, at least 90%, at least 91%, at least 92%, at least 93%, at least 94%, at least 95%, at least 96%, at least 97%, at least 98%, at least 99%, or 100% identity to SEQ ID NO:293 or 294. In some aspects, Fc comprises the amino acid sequence of SEQ ID NO:293 or 294. In some aspects, the sequence has a mutation at N62, for example, N62Q or N62Q at, for example, SEQ ID NO:279. In some preferred aspects, VH1, VH2, VH3, VH4, VL1, VL2, VL3 and VL4 have at least 90% identity with the corresponding amino acid sequences specified above, optionally with (i) an Fc having at least 90% identity with the corresponding amino acid sequence recited above; (ii) one or more linker sequence as specified above; and/or (iii) a mutation at N62 as recited above. In some particularly preferred aspects, VH1, VH2, VH3, VH4, VL1, VL2, VL3 and VL4 comprise or consist of the corresponding amino acid sequences specified above, optionally with (i) an Fc comprising or consisting of the corresponding amino acid sequence recited above; (ii) one or more linker sequence as specified above; and/or (iii) a mutation at N62 as recited above.

[0758] In some aspects, the first polypeptide comprises an amino acid sequence having at least 80%, at least 85%, at least 90%, at least 91%, at least 92%, at least 93%, at least 94%, at least 95%, at least 96%, at least 97%, at least 98%, at least 99%, or 100% identity to SEQ ID NO:385; and the second polypeptide comprises an amino acid sequence having at least 80%, at least 85%, at least 90%, at least 91%, at least 92%, at least 93%, at least 94%, at least 95%, at least 96%, at least 97%, at least 98%, at least 99%, or 100% identity to SEQ ID NO:387. In some aspects, the first polypeptide has at least 90% identity to SEQ ID NO:385 and the second polypeptide has at least 90% identity to SEQ ID NO:387. In some aspects, the first polypeptide comprises the amino acid sequence of SEQ ID NO:385; and the second polypeptide comprises the amino acid sequence of SEQ ID NO:387. In some aspects, the first polypeptide comprises an amino acid sequence encoded by a polynucleotide having at least 80%, at least 85%, at least 90%, at least 91%, at least 92%, at least 93%, at least 94%, at least 95%, at least 96%, at least 97%, at least 98%, at least 99%, or 100% identity to SEQ ID NO:386; and the second polypeptide comprises an amino acid sequence encoded by a polynucleotide having at least 80%, at least 85%, at least 90%, at least 91%, at least 92%, at least 93%, at least 94%, at least 95%, at least 96%, at least 97%, at least 98%, at least 99%, or 100% identity to SEQ ID NO:388. In some aspects, the first polypeptide comprises an amino acid sequence encoded by a polynucleotide having at least 90% identity to SEQ ID NO:386 and the second polypeptide comprises an amino acid sequence encoded by a polynucleotide having at least 90% identity to SEQ ID NO:388. In some aspects, the first polypeptide comprises an amino acid sequence encoded by the polynucleotide of SEQ ID NO:386; and the second polypeptide comprises an amino acid sequence encoded by the polynucleotide of SEQ ID NO:388.

[0759] In some aspects, VH1 comprises an amino acid sequence having at least 80%, at least 85%, at least 90%, at least 91%, at least 92%, at least 93%, at least 94%, at least 95%, at least 96%, at least 97%, at least 98%, at least 99%, or 100% identity to SEQ ID NO:58; VH2 and VH3 comprise an amino acid sequence having at least 80%, at least 85%, at least 90%, at least 91%, at least 92%, at least 93%, at least 94%, at least 95%, at least 96%, at least 97%, at least 98%, at least 99%, or 100% identity to SEQ ID NO:279; VH4 comprises an amino acid sequence having at least 80%, at least 85%, at least 90%, at least 91%, at least 92%, at least 93%, at least 94%, at least 95%, at least 96%, at least 97%, at least 98%, at least 99%, or 100% identity to SEQ ID NO:263; VL1 comprises an amino acid sequence having at least 80%, at least 85%, at least 90%, at least 91%, at least 92%, at least 93%, at least 94%, at least 95%, at least 96%, at least 97%, at least 98%, at least 99%, or 100% identity to SEQ ID NO:54; VL2 and VL3 comprise an amino acid sequence having at least 80%, at least 85%, at least 90%, at least 91%, at least 92%, at least 93%, at least 94%, at least 95%, at least 96%, at least 97%, at least 98%, at least 99%, or 100% identity to SEQ ID NO:275; and VL4 comprises an amino acid sequence having at least 80%, at least 85%, at least 90%, at least 91%, at least 92%, at least 93%, at least 94%, at least 95%, at least 96%, at least 97%, at least 98%, at least 99%, or 100% identity to SEQ ID NO:259. In some aspects, VH1 comprises the amino acid sequence of SEQ ID NO:58; VH2 and VH3 comprise the amino acid sequence of SEQ ID NO:279; VH4 comprises the amino acid sequence of SEQ ID NO:263; VL1 comprises the amino acid sequence of SEQ ID NO:54; VL2 and VL3 comprise the amino acid sequence of SEQ ID NO:275; and VL4 comprises the amino acid sequence of SEQ ID NO:259. In some aspects, L1-L16 comprise the amino acid sequence of any one of SEQ ID NOs:1-34, wherein SEQ ID NO:1 has the amino acid sequence of G, SEQ ID NO:2 has the amino acid sequence of A, SEQ ID NO:3 has the amino acid sequence of GSS and SEQ ID NO:4 has the amino acid sequence of ASG. In some aspects, L1 or L4 and L7 or L10 comprise the amino acid sequence of SEQ ID NO:6; L2 or L5 and L8 or L11 comprise the amino acid sequence of SEQ ID NO:27; and L3 or L6 and L9 or L12 comprise the amino acid sequence of SEQ ID NO:6. In some aspects, L1 or L5 and L9 or L13 comprise the amino acid sequence of SEQ ID NO:6; L2 or L6 and L10 or L14 comprise the amino acid sequence of SEQ ID NO:27; L3 or L7 and L11 or L15 comprise the amino acid sequence of SEQ ID NO:6; and L4 or L8 and L12 or L16 comprise the amino acid sequence of SEQ ID NO:12. In some aspects, Fc comprises a knob-into-hole modification or Fc effector function knockout mutation. In some aspects, Fc comprises an amino acid sequence having at least 80%, at least 85%, at least 90%, at least 91%, at least 92%, at least 93%, at least 94%, at least 95%, at least 96%, at least 97%, at least 98%, at least 99%, or 100% identity to SEQ ID NO:293 or 294. In some aspects, Fc comprises the amino acid sequence of SEQ ID NO:293 or 294. In some aspects, the sequence has a mutation at N62, for example, N62Q or N62Q at, for example, SEQ ID NO:279. In some preferred aspects, VH1, VH2, VH3, VH4, VL1, VL2, VL3 and VL4 have at least 90% identity with the corresponding amino acid sequences specified above, optionally with (i) an Fc having at least 90% identity with the corresponding amino acid sequence recited above; (ii) one or more linker sequence as specified above; and/or (iii) a mutation at N62 as recited above. In some particularly preferred aspects, VH1, VH2, VH3, VH4, VL1, VL2, VL3 and VL4 comprise or consist of the corresponding amino acid sequences specified above, optionally with (i) an Fc comprising or consisting of the corresponding amino acid sequence recited above; (ii) one or more linker sequence as specified above; and/or (iii) a mutation at N62 as recited above.

[0760] In some aspects, the first polypeptide comprises an amino acid sequence having at least 80%, at least 85%, at least 90%, at least 91%, at least 92%, at least 93%, at least 94%, at least 95%, at least 96%, at least 97%, at least 98%, at least 99%, or 100% identity to SEQ ID NO:389; and the second polypeptide comprises an amino acid sequence having at least 80%, at least 85%, at least 90%, at least 91%, at least 92%, at least 93%, at least 94%, at least 95%, at least 96%, at least 97%, at least 98%, at least 99%, or 100% identity to SEQ ID NO:391. In some aspects, the first polypeptide has at least 90% identity to SEQ ID NO:389 and the second polypeptide has at least 90% identity to SEQ ID NO:391. In some aspects, the first polypeptide comprises the amino acid sequence of SEQ ID NO:389; and the second polypeptide comprises the amino acid sequence of SEQ ID NO:391. In some aspects, the first polypeptide comprises an amino acid sequence encoded by a polynucleotide having at least 80%, at least 85%, at least 90%, at least 91%, at least 92%, at least 93%, at least 94%, at least 95%, at least 96%, at least 97%, at least 98%, at least 99%, or 100% identity to SEQ ID NO:390; and the second polypeptide comprises an amino acid sequence encoded by a polynucleotide having at least 80%, at least 85%, at least 90%, at least 91%, at least 92%, at least 93%, at least 94%, at least 95%, at least 96%, at least 97%, at least 98%, at least 99%, or 100% identity to SEQ ID NO:392. In some aspects, the first polypeptide comprises an amino acid sequence encoded by a polynucleotide having at least 90% identity to SEQ ID NO:390 and the second polypeptide comprises an amino acid sequence encoded by a polynucleotide having at least 90% identity to SEQ ID NO:392. In some aspects, the first polypeptide comprises an amino acid sequence encoded by the polynucleotide of SEQ ID NO:390; and the second polypeptide comprises an amino acid sequence encoded by the polynucleotide of SEQ ID NO:392.

[0761] In some aspects, VH1 comprises an amino acid sequence having at least 80%, at least 85%, at least 90%, at least 91%, at least 92%, at least 93%, at least 94%, at least 95%, at least 96%, at least 97%, at least 98%, at least 99%, or 100% identity to SEQ ID NO:58; VH2 and VH3 comprise an amino acid sequence having at least 80%, at least 85%, at least 90%, at least 91%, at least 92%, at least 93%, at least 94%, at least 95%, at least 96%, at least 97%, at least 98%, at least 99%, or 100% identity to SEQ ID NO:271; VH4 comprises an amino acid sequence having at least 80%, at least 85%, at least 90%, at least 91%, at least 92%, at least 93%, at least 94%, at least 95%, at least 96%, at least 97%, at least 98%, at least 99%, or 100% identity to SEQ ID NO:279; VL1 comprises an amino acid sequence having at least 80%, at least 85%, at least 90%, at least 91%, at least 92%, at least 93%, at least 94%, at least 95%, at least 96%, at least 97%, at least 98%, at least 99%, or 100% identity to SEQ ID NO:54; VL2 and VL3 comprise an amino acid sequence having at least 80%, at least 85%, at least 90%, at least 91%, at least 92%, at least 93%, at least 94%, at least 95%, at least 96%, at least 97%, at least 98%, at least 99%, or 100% identity to SEQ ID NO:267; and VL4 comprises an amino acid sequence having at least 80%, at least 85%, at least 90%, at least 91%, at least 92%, at least 93%, at least 94%, at least 95%, at least 96%, at least 97%, at least 98%, at least 99%, or 100% identity to SEQ ID NO:275. In some aspects, VH1 comprises the amino acid sequence of SEQ ID NO:58; VH2 and VH3 comprise the amino acid sequence of SEQ ID NO:271; VH4 comprises the amino acid sequence of SEQ ID NO:279; VL1 comprises the amino acid sequence of SEQ ID NO:54; VL2 and VL3 comprise the amino acid sequence of SEQ ID NO:267; and VL4 comprises the amino acid sequence of SEQ ID NO:275. In some aspects, L1-L16 comprise the amino acid sequence of any one of SEQ ID NOs:1-34, wherein SEQ ID NO:1 has the amino acid sequence of G, SEQ ID NO:2 has the amino acid sequence of A, SEQ ID NO:3 has the amino acid sequence of GSS and SEQ ID NO:4 has the amino acid sequence of ASG. In some aspects, L1 or L4 and L7 or L10 comprise the amino acid sequence of SEQ ID NO:6; L2 or L5 and L8 or L11 comprise the amino acid sequence of SEQ ID NO:27; and L3 or L6 and L9 or L12 comprise the amino acid sequence of SEQ ID NO:6. In some aspects, L1 or L5 and L9 or L13 comprise the amino acid sequence of SEQ ID NO:6; L2 or L6 and L10 or L14 comprise the amino acid sequence of SEQ ID NO:27; L3 or L7 and L11 or L15 comprise the amino acid sequence of SEQ ID NO:6; and L4 or L8 and L12 or L16 comprise the amino acid sequence of SEQ ID NO:12. In some aspects, Fc comprises a knob-into-hole modification or Fc effector function knockout mutation. In some aspects, Fc comprises an amino acid sequence having at least 80%, at least 85%, at least 90%, at least 91%, at least 92%, at least 93%, at least 94%, at least 95%, at least 96%, at least 97%, at least 98%, at least 99%, or 100% identity to SEQ ID NO:293 or 294. In some aspects, Fc comprises the amino acid sequence of SEQ ID NO:293 or 294. In some aspects, the sequence has a mutation at N62, for example, N62Q or N62Q at, for example, SEQ ID NO:279. In some preferred aspects, VH1, VH2, VH3, VH4, VL1, VL2, VL3 and VL4 have at least 90% identity with the corresponding amino acid sequences specified above, optionally with (i) an Fc having at least 90% identity with the corresponding amino acid sequence recited above; (ii) one or more linker sequence as specified above; and/or (iii) a mutation at N62 as recited above. In some particularly preferred aspects, VH1, VH2, VH3, VH4, VL1, VL2, VL3 and VL4 comprise or consist of the corresponding amino acid sequences specified above, optionally with (i) an Fc comprising or consisting of the corresponding amino acid sequence recited above; (ii) one or more linker sequence as specified above; and/or (iii) a mutation at N62 as recited above.

[0762] In some aspects, the first polypeptide comprises an amino acid sequence having at least 80%, at least 85%, at least 90%, at least 91%, at least 92%, at least 93%, at least 94%, at least 95%, at least 96%, at least 97%, at least 98%, at least 99%, or 100% identity to SEQ ID NO:257; and the second polypeptide comprises an amino acid sequence having at least 80%, at least 85%, at least 90%, at least 91%, at least 92%, at least 93%, at least 94%, at least 95%, at least 96%, at least 97%, at least 98%, at least 99%, or 100% identity to SEQ ID NO:258. In some aspects, the first polypeptide has at least 90% identity to SEQ ID NO:257 and the second polypeptide has at least 90% identity to SEQ ID NO:258. In some aspects, the first polypeptide comprises the amino acid sequence of SEQ ID NO:257; and the second polypeptide comprises the amino acid sequence of SEQ ID NO:258. In some aspects, the first polypeptide comprises an amino acid sequence encoded by a polynucleotide having at least 80%, at least 85%, at least 90%, at least 91%, at least 92%, at least 93%, at least 94%, at least 95%, at least 96%, at least 97%, at least 98%, at least 99%, or 100% identity to SEQ ID NO:393; and the second polypeptide comprises an amino acid sequence encoded by a polynucleotide having at least 80%, at least 85%, at least 90%, at least 91%, at least 92%, at least 93%, at least 94%, at least 95%, at least 96%, at least 97%, at least 98%, at least 99%, or 100% identity to SEQ ID NO:394. In some aspects, the first polypeptide comprises an amino acid sequence encoded by a polynucleotide having at least 90% identity to SEQ ID NO:393 and the second polypeptide comprises an amino acid sequence encoded by a polynucleotide having at least 90% identity to SEQ ID NO:394. In some aspects, the first polypeptide comprises an amino acid sequence encoded by the polynucleotide of SEQ ID NO:393; and the second polypeptide comprises an amino acid sequence encoded by the polynucleotide of SEQ ID NO:394.

[0763] In some aspects, VH1 comprises an amino acid sequence having at least 80%, at least 85%, at least 90%, at least 91%, at least 92%, at least 93%, at least 94%, at least 95%, at least 96%, at least 97%, at least 98%, at least 99%, or 100% identity to SEQ ID NO:58; VH2 and VH4 comprise an amino acid sequence having at least 80%, at least 85%, at least 90%, at least 91%, at least 92%, at least 93%, at least 94%, at least 95%, at least 96%, at least 97%, at least 98%, at least 99%, or 100% identity to SEQ ID NO:271; VH3 comprises an amino acid sequence having at least 80%, at least 85%, at least 90%, at least 91%, at least 92%, at least 93%, at least 94%, at least 95%, at least 96%, at least 97%, at least 98%, at least 99%, or 100% identity to SEQ ID NO:279; VL1 comprises an amino acid sequence having at least 80%, at least 85%, at least 90%, at least 91%, at least 92%, at least 93%, at least 94%, at least 95%, at least 96%, at least 97%, at least 98%, at least 99%, or 100% identity to SEQ ID NO:54; VL2 and VL4 comprise an amino acid sequence having at least 80%, at least 85%, at least 90%, at least 91%, at least 92%, at least 93%, at least 94%, at least 95%, at least 96%, at least 97%, at least 98%, at least 99%, or 100% identity to SEQ ID NO:267; and VL3 comprises an amino acid sequence having at least 80%, at least 85%, at least 90%, at least 91%, at least 92%, at least 93%, at least 94%, at least 95%, at least 96%, at least 97%, at least 98%, at least 99%, or 100% identity to SEQ ID NO:275. In some aspects, VH1 comprises the amino acid sequence of SEQ ID NO:58; VH2 and VH4 comprise the amino acid sequence of SEQ ID NO:271; VH3 comprises the amino acid sequence of SEQ ID NO:279; VL1 comprises the amino acid sequence of SEQ ID NO:54; VL2 and VL4 comprise the amino acid sequence of SEQ ID NO:267; and VL3 comprises the amino acid sequence of SEQ ID NO:275. In some aspects, L1-L16 comprise the amino acid sequence of any one of SEQ ID NOs:1-34, wherein SEQ ID NO:1 has the amino acid sequence of G, SEQ ID NO:2 has the amino acid sequence of A, SEQ ID NO:3 has the amino acid sequence of GSS and SEQ ID NO:4 has the amino acid sequence of ASG. In some aspects, L1 or L4 and L7 or L10 comprise the amino acid sequence of SEQ ID NO:6; L2 or L5 and L8 or L11 comprise the amino acid sequence of SEQ ID NO:27; and L3 or L6 and L9 or L12 comprise the amino acid sequence of SEQ ID NO:6. In some aspects, L1 or L5 and L9 or L13 comprise the amino acid sequence of SEQ ID NO:6; L2 or L6 and L10 or L14 comprise the amino acid sequence of SEQ ID NO:27; L3 or L7 and L11 or L15 comprise the amino acid sequence of SEQ ID NO:6; and L4 or L8 and L12 or L16 comprise the amino acid sequence of SEQ ID NO:12. In some aspects, Fc comprises a knob-into-hole modification or Fc effector function knockout mutation. In some aspects, Fc comprises an amino acid sequence having at least 80%, at least 85%, at least 90%, at least 91%, at least 92%, at least 93%, at least 94%, at least 95%, at least 96%, at least 97%, at least 98%, at least 99%, or 100% identity to SEQ ID NO:293 or 294. In some aspects, Fc comprises the amino acid sequence of SEQ ID NO:293 or 294. In some aspects, the sequence has a mutation at N62, for example, N62Q or N62Q at, for example, SEQ ID NO:279. In some preferred aspects, VH1, VH2, VH3, VH4, VL1, VL2, VL3 and VL4 have at least 90% identity with the corresponding amino acid sequences specified above, optionally with (i) an Fc having at least 90% identity with the corresponding amino acid sequence recited above; (ii) one or more linker sequence as specified above; and/or (iii) a mutation at N62 as recited above. In some particularly preferred aspects, VH1, VH2, VH3, VH4, VL1, VL2, VL3 and VL4 comprise or consist of the corresponding amino acid sequences specified above, optionally with (i) an Fc comprising or consisting of the corresponding amino acid sequence recited above; (ii) one or more linker sequence as specified above; and/or (iii) a mutation at N62 as recited above.

[0764] In some aspects, the first polypeptide comprises an amino acid sequence having at least 80%, at least 85%, at least 90%, at least 91%, at least 92%, at least 93%, at least 94%, at least 95%, at least 96%, at least 97%, at least 98%, at least 99%, or 100% identity to SEQ ID NO:395; and the second polypeptide comprises an amino acid sequence having at least 80%, at least 85%, at least 90%, at least 91%, at least 92%, at least 93%, at least 94%, at least 95%, at least 96%, at least 97%, at least 98%, at least 99%, or 100% identity to SEQ ID NO:397. In some aspects, the first polypeptide has at least 90% identity to SEQ ID NO:395 and the second polypeptide has at least 90% identity to SEQ ID NO:397. In some aspects, the first polypeptide comprises the amino acid sequence of SEQ ID NO:395; and the second polypeptide comprises the amino acid sequence of SEQ ID NO:397. In some aspects, the first polypeptide comprises an amino acid sequence encoded by a polynucleotide having at least 80%, at least 85%, at least 90%, at least 91%, at least 92%, at least 93%, at least 94%, at least 95%, at least 96%, at least 97%, at least 98%, at least 99%, or 100% identity to SEQ ID NO:396; and the second polypeptide comprises an amino acid sequence encoded by a polynucleotide having at least 80%, at least 85%, at least 90%, at least 91%, at least 92%, at least 93%, at least 94%, at least 95%, at least 96%, at least 97%, at least 98%, at least 99%, or 100% identity to SEQ ID NO:398. In some aspects, the first polypeptide comprises an amino acid sequence encoded by a polynucleotide having at least 90% identity to SEQ ID NO:396 and the second polypeptide comprises an amino acid sequence encoded by a polynucleotide having at least 90% identity to SEQ ID NO:398. In some aspects, the first polypeptide comprises an amino acid sequence encoded by the polynucleotide of SEQ ID NO:396; and the second polypeptide comprises an amino acid sequence encoded by the polynucleotide of SEQ ID NO:398.

[0765] In some aspects, VH1 and VH3 comprise an amino acid sequence having at least 80%, at least 85%, at least 90%, at least 91%, at least 92%, at least 93%, at least 94%, at least 95%, at least 96%, at least 97%, at least 98%, at least 99%, or 100% identity to SEQ ID NO:271; VH2 comprises an amino acid sequence having at least 80%, at least 85%, at least 90%, at least 91%, at least 92%, at least 93%, at least 94%, at least 95%, at least 96%, at least 97%, at least 98%, at least 99%, or 100% identity to SEQ ID NO:58; VH4 comprises an amino acid sequence having at least 80%, at least 85%, at least 90%, at least 91%, at least 92%, at least 93%, at least 94%, at least 95%, at least 96%, at least 97%, at least 98%, at least 99%, or 100% identity to SEQ ID NO:279; VL1 and VL3 comprise an amino acid sequence having at least 80%, at least 85%, at least 90%, at least 91%, at least 92%, at least 93%, at least 94%, at least 95%, at least 96%, at least 97%, at least 98%, at least 99%, or 100% identity to SEQ ID NO:267; VL2 comprises an amino acid sequence having at least 80%, at least 85%, at least 90%, at least 91%, at least 92%, at least 93%, at least 94%, at least 95%, at least 96%, at least 97%, at least 98%, at least 99%, or 100% identity to SEQ ID NO:54; and VL4 comprises an amino acid sequence having at least 80%, at least 85%, at least 90%, at least 91%, at least 92%, at least 93%, at least 94%, at least 95%, at least 96%, at least 97%, at least 98%, at least 99%, or 100% identity to SEQ ID NO:275. In some aspects, VH1 and VH3 comprise the amino acid sequence of SEQ ID NO:271; VH2 comprises the amino acid sequence of SEQ ID NO:58; VH4 comprises the amino acid sequence of SEQ ID NO:279; VL1 and VL3 comprise the amino acid sequence of SEQ ID NO:267; VL2 comprises the amino acid sequence of SEQ ID NO:54; and VL4 comprises the amino acid sequence of SEQ ID NO:275. In some aspects, L1-L16 comprise the amino acid sequence of any one of SEQ ID NOs:1-34, wherein SEQ ID NO:1 has the amino acid sequence of G, SEQ ID NO:2 has the amino acid sequence of A, SEQ ID NO:3 has the amino acid sequence of GSS and SEQ ID NO:4 has the amino acid sequence of ASG. In some aspects, L1 or L4 and L7 or L10 comprise the amino acid sequence of SEQ ID NO:6; L2 or L5 and L8 or L11 comprise the amino acid sequence of SEQ ID NO:27; and L3 or L6 and L9 or L12 comprise the amino acid sequence of SEQ ID NO:6. In some aspects, L1 or L5 and L9 or L13 comprise the amino acid sequence of SEQ ID NO:6; L2 or L6 and L10 or L14 comprise the amino acid sequence of SEQ ID NO:27; L3 or L7 and L11 or L15 comprise the amino acid sequence of SEQ ID NO:6; and L4 or L8 and L12 or L16 comprise the amino acid sequence of SEQ ID NO:12. In some aspects, Fc comprises a knob-into-hole modification or Fc effector function knockout mutation. In some aspects, Fc comprises an amino acid sequence having at least 80%, at least 85%, at least 90%, at least 91%, at least 92%, at least 93%, at least 94%, at least 95%, at least 96%, at least 97%, at least 98%, at least 99%, or 100% identity to SEQ ID NO:293 or 294. In some aspects, Fc comprises the amino acid sequence of SEQ ID NO:293 or 294. In some aspects, the sequence has a mutation at N62, for example, N62Q or N62Q at, for example, SEQ ID NO:279. In some preferred aspects, VH1, VH2, VH3, VH4, VL1, VL2, VL3 and VL4 have at least 90% identity with the corresponding amino acid sequences specified above, optionally with (i) an Fc having at least 90% identity with the corresponding amino acid sequence recited above; (ii) one or more linker sequence as specified above; and/or (iii) a mutation at N62 as recited above. In some particularly preferred aspects, VH1, VH2, VH3, VH4, VL1, VL2, VL3 and VL4 comprise or consist of the corresponding amino acid sequences specified above, optionally with (i) an Fc comprising or consisting of the corresponding amino acid sequence recited above; (ii) one or more linker sequence as specified above; and/or (iii) a mutation at N62 as recited above.

[0766] In some aspects, the first polypeptide comprises an amino acid sequence having at least 80%, at least 85%, at least 90%, at least 91%, at least 92%, at least 93%, at least 94%, at least 95%, at least 96%, at least 97%, at least 98%, at least 99%, or 100% identity to SEQ ID NO:399; and the second polypeptide comprises an amino acid sequence having at least 80%, at least 85%, at least 90%, at least 91%, at least 92%, at least 93%, at least 94%, at least 95%, at least 96%, at least 97%, at least 98%, at least 99%, or 100% identity to SEQ ID NO:401. In some aspects, the first polypeptide has at least 90% identity to SEQ ID NO:399 and the second polypeptide has at least 90% identity to SEQ ID NO:401. In some aspects, the first polypeptide comprises the amino acid sequence of SEQ ID NO:399; and the second polypeptide comprises the amino acid sequence of SEQ ID NO:401. In some aspects, the first polypeptide comprises an amino acid sequence encoded by a polynucleotide having at least 80%, at least 85%, at least 90%, at least 91%, at least 92%, at least 93%, at least 94%, at least 95%, at least 96%, at least 97%, at least 98%, at least 99%, or 100% identity to SEQ ID NO:400; and the second polypeptide comprises an amino acid sequence encoded by a polynucleotide having at least 80%, at least 85%, at least 90%, at least 91%, at least 92%, at least 93%, at least 94%, at least 95%, at least 96%, at least 97%, at least 98%, at least 99%, or 100% identity to SEQ ID NO:402. In some aspects, the first polypeptide comprises an amino acid sequence encoded by a polynucleotide having at least 90% identity to SEQ ID NO:400 and the second polypeptide comprises an amino acid sequence encoded by a polynucleotide having at least 90% identity to SEQ ID NO:402. In some aspects, the first polypeptide comprises an amino acid sequence encoded by the polynucleotide of SEQ ID NO:400; and the second polypeptide comprises an amino acid sequence encoded by the polynucleotide of SEQ ID NO:402.

[0767] In some aspects, VH1 and VH4 comprise an amino acid sequence having at least 80%, at least 85%, at least 90%, at least 91%, at least 92%, at least 93%, at least 94%, at least 95%, at least 96%, at least 97%, at least 98%, at least 99%, or 100% identity to SEQ ID NO:271; VH2 comprises an amino acid sequence having at least 80%, at least 85%, at least 90%, at least 91%, at least 92%, at least 93%, at least 94%, at least 95%, at least 96%, at least 97%, at least 98%, at least 99%, or 100% identity to SEQ ID NO:58; VH3 comprises an amino acid sequence having at least 80%, at least 85%, at least 90%, at least 91%, at least 92%, at least 93%, at least 94%, at least 95%, at least 96%, at least 97%, at least 98%, at least 99%, or 100% identity to SEQ ID NO:279; VL1 and VL4 comprise an amino acid sequence having at least 80%, at least 85%, at least 90%, at least 91%, at least 92%, at least 93%, at least 94%, at least 95%, at least 96%, at least 97%, at least 98%, at least 99%, or 100% identity to SEQ ID NO:267; VL2 comprises an amino acid sequence having at least 80%, at least 85%, at least 90%, at least 91%, at least 92%, at least 93%, at least 94%, at least 95%, at least 96%, at least 97%, at least 98%, at least 99%, or 100% identity to SEQ ID NO:54; and VL3 comprises an amino acid sequence having at least 80%, at least 85%, at least 90%, at least 91%, at least 92%, at least 93%, at least 94%, at least 95%, at least 96%, at least 97%, at least 98%, at least 99%, or 100% identity to SEQ ID NO:275. In some aspects, VH1 and VH4 comprise the amino acid sequence of SEQ ID NO:271; VH2 comprises the amino acid sequence of SEQ ID NO:58; VH3 comprises the amino acid sequence of SEQ ID NO:279; VL1 and VL4 comprise the amino acid sequence of SEQ ID NO:267; VL2 comprises the amino acid sequence of SEQ ID NO:54; and VL3 comprises the amino acid sequence of SEQ ID NO:275. In some aspects, L1-L16 comprise the amino acid sequence of any one of SEQ ID NOs:1-34, wherein SEQ ID NO:1 has the amino acid sequence of G, SEQ ID NO:2 has the amino acid sequence of A, SEQ ID NO:3 has the amino acid sequence of GSS and SEQ ID NO:4 has the amino acid sequence of ASG. In some aspects, L1 or L4 and L7 or L10 comprise the amino acid sequence of SEQ ID NO:6; L2 or L5 and L8 or L11 comprise the amino acid sequence of SEQ ID NO:27; and L3 or L6 and L9 or L12 comprise the amino acid sequence of SEQ ID NO:6. In some aspects, L1 or L5 and L9 or L13 comprise the amino acid sequence of SEQ ID NO:6; L2 or L6 and L10 or L14 comprise the amino acid sequence of SEQ ID NO:27; L3 or L7 and L11 or L15 comprise the amino acid sequence of SEQ ID NO:6; and L4 or L8 and L12 or L16 comprise the amino acid sequence of SEQ ID NO:12. In some aspects, Fc comprises a knob-into-hole modification or Fc effector function knockout mutation. In some aspects, Fc comprises an amino acid sequence having at least 80%, at least 85%, at least 90%, at least 91%, at least 92%, at least 93%, at least 94%, at least 95%, at least 96%, at least 97%, at least 98%, at least 99%, or 100% identity to SEQ ID NO:293 or 294. In some aspects, Fc comprises the amino acid sequence of SEQ ID NO:293 or 294. In some aspects, the sequence has a mutation at N62, for example, N62Q or N62Q at, for example, SEQ ID NO:279. In some preferred aspects, VH1, VH2, VH3, VH4, VL1, VL2, VL3 and VL4 have at least 90% identity with the corresponding amino acid sequences specified above, optionally with (i) an Fc having at least 90% identity with the corresponding amino acid sequence recited above; (ii) one or more linker sequence as specified above; and/or (iii) a mutation at N62 as recited above. In some particularly preferred aspects, VH1, VH2, VH3, VH4, VL1, VL2, VL3 and VL4 comprise or consist of the corresponding amino acid sequences specified above, optionally with (i) an Fc comprising or consisting of the corresponding amino acid sequence recited above; (ii) one or more linker sequence as specified above; and/or (iii) a mutation at N62 as recited above.

[0768] In some aspects, the first polypeptide comprises an amino acid sequence having at least 80%, at least 85%, at least 90%, at least 91%, at least 92%, at least 93%, at least 94%, at least 95%, at least 96%, at least 97%, at least 98%, at least 99%, or 100% identity to SEQ ID NO:403; and the second polypeptide comprises an amino acid sequence having at least 80%, at least 85%, at least 90%, at least 91%, at least 92%, at least 93%, at least 94%, at least 95%, at least 96%, at least 97%, at least 98%, at least 99%, or 100% identity to SEQ ID NO:405. In some aspects, the first polypeptide has at least 90% identity to SEQ ID NO:403 and the second polypeptide has at least 90% identity to SEQ ID NO:405. In some aspects, the first polypeptide comprises the amino acid sequence of SEQ ID NO:403; and the second polypeptide comprises the amino acid sequence of SEQ ID NO:405. In some aspects, the first polypeptide comprises an amino acid sequence encoded by a polynucleotide having at least 80%, at least 85%, at least 90%, at least 91%, at least 92%, at least 93%, at least 94%, at least 95%, at least 96%, at least 97%, at least 98%, at least 99%, or 100% identity to SEQ ID NO:404; and the second polypeptide comprises an amino acid sequence encoded by a polynucleotide having at least 80%, at least 85%, at least 90%, at least 91%, at least 92%, at least 93%, at least 94%, at least 95%, at least 96%, at least 97%, at least 98%, at least 99%, or 100% identity to SEQ ID NO:406. In some aspects, the first polypeptide comprises an amino acid sequence encoded by a polynucleotide having at least 90% identity to SEQ ID NO:404 and the second polypeptide comprises an amino acid sequence encoded by a polynucleotide having at least 90% identity to SEQ ID NO:406. In some aspects, the first polypeptide comprises an amino acid sequence encoded by the polynucleotide of SEQ ID NO:404; and the second polypeptide comprises an amino acid sequence encoded by the polynucleotide of SEQ ID NO:406.

[0769] In some aspects, VH1 and VH3 comprise an amino acid sequence having at least 80%, at least 85%, at least 90%, at least 91%, at least 92%, at least 93%, at least 94%, at least 95%, at least 96%, at least 97%, at least 98%, at least 99%, or 100% identity to SEQ ID NO:58; VH2 comprises an amino acid sequence having at least 80%, at least 85%, at least 90%, at least 91%, at least 92%, at least 93%, at least 94%, at least 95%, at least 96%, at least 97%, at least 98%, at least 99%, or 100% identity to SEQ ID NO:271; VH4 comprises an amino acid sequence having at least 80%, at least 85%, at least 90%, at least 91%, at least 92%, at least 93%, at least 94%, at least 95%, at least 96%, at least 97%, at least 98%, at least 99%, or 100% identity to SEQ ID NO:279; VL1 and VL3 comprise an amino acid sequence having at least 80%, at least 85%, at least 90%, at least 91%, at least 92%, at least 93%, at least 94%, at least 95%, at least 96%, at least 97%, at least 98%, at least 99%, or 100% identity to SEQ ID NO:54; VL2 comprises an amino acid sequence having at least 80%, at least 85%, at least 90%, at least 91%, at least 92%, at least 93%, at least 94%, at least 95%, at least 96%, at least 97%, at least 98%, at least 99%, or 100% identity to SEQ ID NO:267; and VL4 comprises an amino acid sequence having at least 80%, at least 85%, at least 90%, at least 91%, at least 92%, at least 93%, at least 94%, at least 95%, at least 96%, at least 97%, at least 98%, at least 99%, or 100% identity to SEQ ID NO:275. In some aspects, VH1 and VH3 comprise the amino acid sequence of SEQ ID NO:58; VH2 comprises the amino acid sequence of SEQ ID NO:271; VH4 comprises the amino acid sequence of SEQ ID NO:279; VL1 and VL3 comprise the amino acid sequence of SEQ ID NO:54; VL2 comprises the amino acid sequence of SEQ ID NO:267; and VL4 comprises the amino acid sequence of SEQ ID NO:275. In some aspects, L1-L16 comprise the amino acid sequence of any one of SEQ ID NOs:1-34, wherein SEQ ID NO:1 has the amino acid sequence of G, SEQ ID NO:2 has the amino acid sequence of A, SEQ ID NO:3 has the amino acid sequence of GSS and SEQ ID NO:4 has the amino acid sequence of ASG. In some aspects, L1 or L4 and L7 or L10 comprise the amino acid sequence of SEQ ID NO:6; L2 or L5 and L8 or L11 comprise the amino acid sequence of SEQ ID NO:27; and L3 or L6 and L9 or L12 comprise the amino acid sequence of SEQ ID NO:6. In some aspects, L1 or L5 and L9 or L13 comprise the amino acid sequence of SEQ ID NO:6; L2 or L6 and L10 or L14 comprise the amino acid sequence of SEQ ID NO:27; L3 or L7 and L11 or L15 comprise the amino acid sequence of SEQ ID NO:6; and L4 or L8 and L12 or L16 comprise the amino acid sequence of SEQ ID NO:12. In some aspects, Fc comprises a knob-into-hole modification or Fc effector function knockout mutation. In some aspects, Fc comprises an amino acid sequence having at least 80%, at least 85%, at least 90%, at least 91%, at least 92%, at least 93%, at least 94%, at least 95%, at least 96%, at least 97%, at least 98%, at least 99%, or 100% identity to SEQ ID NO:293 or 294. In some aspects, Fc comprises the amino acid sequence of SEQ ID NO:293 or 294. In some aspects, the sequence has a mutation at N62, for example, N62Q or N62Q at, for example, SEQ ID NO:279. In some preferred aspects, VH1, VH2, VH3, VH4, VL1, VL2, VL3 and VL4 have at least 90% identity with the corresponding amino acid sequences specified above, optionally with (i) an Fc having at least 90% identity with the corresponding amino acid sequence recited above; (ii) one or more linker sequence as specified above; and/or (iii) a mutation at N62 as recited above. In some particularly preferred aspects, VH1, VH2, VH3, VH4, VL1, VL2, VL3 and VL4 comprise or consist of the corresponding amino acid sequences specified above, optionally with (i) an Fc comprising or consisting of the corresponding amino acid sequence recited above; (ii) one or more linker sequence as specified above; and/or (iii) a mutation at N62 as recited above.

[0770] In some aspects, the first polypeptide comprises an amino acid sequence having at least 80%, at least 85%, at least 90%, at least 91%, at least 92%, at least 93%, at least 94%, at least 95%, at least 96%, at least 97%, at least 98%, at least 99%, or 100% identity to SEQ ID NO:407; and the second polypeptide comprises an amino acid sequence having at least 80%, at least 85%, at least 90%, at least 91%, at least 92%, at least 93%, at least 94%, at least 95%, at least 96%, at least 97%, at least 98%, at least 99%, or 100% identity to SEQ ID NO:409. In some aspects, the first polypeptide has at least 90% identity to SEQ ID NO:407 and the second polypeptide has at least 90% identity to SEQ ID NO:409. In some aspects, the first polypeptide comprises the amino acid sequence of SEQ ID NO:407; and the second polypeptide comprises the amino acid sequence of SEQ ID NO:409. In some aspects, the first polypeptide comprises an amino acid sequence encoded by a polynucleotide having at least 80%, at least 85%, at least 90%, at least 91%, at least 92%, at least 93%, at least 94%, at least 95%, at least 96%, at least 97%, at least 98%, at least 99%, or 100% identity to SEQ ID NO:408; and the second polypeptide comprises an amino acid sequence encoded by a polynucleotide having at least 80%, at least 85%, at least 90%, at least 91%, at least 92%, at least 93%, at least 94%, at least 95%, at least 96%, at least 97%, at least 98%, at least 99%, or 100% identity to SEQ ID NO:410. In some aspects, the first polypeptide comprises an amino acid sequence encoded by a polynucleotide having at least 90% identity to SEQ ID NO:408 and the second polypeptide comprises an amino acid sequence encoded by a polynucleotide having at least 90% identity to SEQ ID NO:410. In some aspects, the first polypeptide comprises an amino acid sequence encoded by the polynucleotide of SEQ ID NO:408; and the second polypeptide comprises an amino acid sequence encoded by the polynucleotide of SEQ ID NO:410.

[0771] In some aspects, VH1 and VH4 comprise an amino acid sequence having at least 80%, at least 85%, at least 90%, at least 91%, at least 92%, at least 93%, at least 94%, at least 95%, at least 96%, at least 97%, at least 98%, at least 99%, or 100% identity to SEQ ID NO:58; VH2 comprises an amino acid sequence having at least 80%, at least 85%, at least 90%, at least 91%, at least 92%, at least 93%, at least 94%, at least 95%, at least 96%, at least 97%, at least 98%, at least 99%, or 100% identity to SEQ ID NO:271; VH3 comprises an amino acid sequence having at least 80%, at least 85%, at least 90%, at least 91%, at least 92%, at least 93%, at least 94%, at least 95%, at least 96%, at least 97%, at least 98%, at least 99%, or 100% identity to SEQ ID NO:279; VL1 and VL4 comprise an amino acid sequence having at least 80%, at least 85%, at least 90%, at least 91%, at least 92%, at least 93%, at least 94%, at least 95%, at least 96%, at least 97%, at least 98%, at least 99%, or 100% identity to SEQ ID NO:54; VL2 comprises an amino acid sequence having at least 80%, at least 85%, at least 90%, at least 91%, at least 92%, at least 93%, at least 94%, at least 95%, at least 96%, at least 97%, at least 98%, at least 99%, or 100% identity to SEQ ID NO:267; and VL3 comprises an amino acid sequence having at least 80%, at least 85%, at least 90%, at least 91%, at least 92%, at least 93%, at least 94%, at least 95%, at least 96%, at least 97%, at least 98%, at least 99%, or 100% identity to SEQ ID NO:275. In some aspects, VH1 and VH4 comprise the amino acid sequence of SEQ ID NO:58; VH2 comprises the amino acid sequence of SEQ ID NO:271; VH3 comprises the amino acid sequence of SEQ ID NO:279; VL1 and VL4 comprise the amino acid sequence of SEQ ID NO:54; VL2 comprises the amino acid sequence of SEQ ID NO:267; and VL3 comprises the amino acid sequence of SEQ ID NO:275. In some aspects, L1-L16 comprise the amino acid sequence of any one of SEQ ID NOs:1-34, wherein SEQ ID NO:1 has the amino acid sequence of G, SEQ ID NO:2 has the amino acid sequence of A, SEQ ID NO:3 has the amino acid sequence of GSS and SEQ ID NO:4 has the amino acid sequence of ASG. In some aspects, L1 or L4 and L7 or L10 comprise the amino acid sequence of SEQ ID NO:6; L2 or L5 and L8 or L11 comprise the amino acid sequence of SEQ ID NO:27; and L3 or L6 and L9 or L12 comprise the amino acid sequence of SEQ ID NO:6. In some aspects, L1 or L5 and L9 or L13 comprise the amino acid sequence of SEQ ID NO:6; L2 or L6 and L10 or L14 comprise the amino acid sequence of SEQ ID NO:27; L3 or L7 and L11 or L15 comprise the amino acid sequence of SEQ ID NO:6; and L4 or L8 and L12 or L16 comprise the amino acid sequence of SEQ ID NO:12. In some aspects, Fc comprises a knob-into-hole modification or Fc effector function knockout mutation. In some aspects, Fc comprises an amino acid sequence having at least 80%, at least 85%, at least 90%, at least 91%, at least 92%, at least 93%, at least 94%, at least 95%, at least 96%, at least 97%, at least 98%, at least 99%, or 100% identity to SEQ ID NO:293 or 294. In some aspects, Fc comprises the amino acid sequence of SEQ ID NO:293 or 294. In some aspects, the sequence has a mutation at N62, for example, N62Q or N62Q at, for example, SEQ ID NO:279. In some preferred aspects, VH1, VH2, VH3, VH4, VL1, VL2, VL3 and VL4 have at least 90% identity with the corresponding amino acid sequences specified above, optionally with (i) an Fc having at least 90% identity with the corresponding amino acid sequence recited above; (ii) one or more linker sequence as specified above; and/or (iii) a mutation at N62 as recited above. In some particularly preferred aspects, VH1, VH2, VH3, VH4, VL1, VL2, VL3 and VL4 comprise or consist of the corresponding amino acid sequences specified above, optionally with (i) an Fc comprising or consisting of the corresponding amino acid sequence recited above; (ii) one or more linker sequence as specified above; and/or (iii) a mutation at N62 as recited above.

[0772] In some aspects, the first polypeptide comprises an amino acid sequence having at least 80%, at least 85%, at least 90%, at least 91%, at least 92%, at least 93%, at least 94%, at least 95%, at least 96%, at least 97%, at least 98%, at least 99%, or 100% identity to SEQ ID NO:411; and the second polypeptide comprises an amino acid sequence having at least 80%, at least 85%, at least 90%, at least 91%, at least 92%, at least 93%, at least 94%, at least 95%, at least 96%, at least 97%, at least 98%, at least 99%, or 100% identity to SEQ ID NO:413. In some aspects, the first polypeptide has at least 90% identity to SEQ ID NO:411 and the second polypeptide has at least 90% identity to SEQ ID NO:413. In some aspects, the first polypeptide comprises the amino acid sequence of SEQ ID NO:411; and the second polypeptide comprises the amino acid sequence of SEQ ID NO:413. In some aspects, the first polypeptide comprises an amino acid sequence encoded by a polynucleotide having at least 80%, at least 85%, at least 90%, at least 91%, at least 92%, at least 93%, at least 94%, at least 95%, at least 96%, at least 97%, at least 98%, at least 99%, or 100% identity to SEQ ID NO:412; and the second polypeptide comprises an amino acid sequence encoded by a polynucleotide having at least 80%, at least 85%, at least 90%, at least 91%, at least 92%, at least 93%, at least 94%, at least 95%, at least 96%, at least 97%, at least 98%, at least 99%, or 100% identity to SEQ ID NO:414. In some aspects, the first polypeptide comprises an amino acid sequence encoded by a polynucleotide having at least 90% identity to SEQ ID NO:412 and the second polypeptide comprises an amino acid sequence encoded by a polynucleotide having at least 90% identity to SEQ ID NO:414. In some aspects, the first polypeptide comprises an amino acid sequence encoded by the polynucleotide of SEQ ID NO:412; and the second polypeptide comprises an amino acid sequence encoded by the polynucleotide of SEQ ID NO:414.

[0773] In some aspects, VH1 comprises an amino acid sequence having at least 80%, at least 85%, at least 90%, at least 91%, at least 92%, at least 93%, at least 94%, at least 95%, at least 96%, at least 97%, at least 98%, at least 99%, or 100% identity to SEQ ID NO:271; VH2 and VH3 comprise an amino acid sequence having at least 80%, at least 85%, at least 90%, at least 91%, at least 92%, at least 93%, at least 94%, at least 95%, at least 96%, at least 97%, at least 98%, at least 99%, or 100% identity to SEQ ID NO:58; VH4 comprises an amino acid sequence having at least 80%, at least 85%, at least 90%, at least 91%, at least 92%, at least 93%, at least 94%, at least 95%, at least 96%, at least 97%, at least 98%, at least 99%, or 100% identity to SEQ ID NO:279; VL1 comprises an amino acid sequence having at least 80%, at least 85%, at least 90%, at least 91%, at least 92%, at least 93%, at least 94%, at least 95%, at least 96%, at least 97%, at least 98%, at least 99%, or 100% identity to SEQ ID NO:267; VL2 and VL3 comprise an amino acid sequence having at least 80%, at least 85%, at least 90%, at least 91%, at least 92%, at least 93%, at least 94%, at least 95%, at least 96%, at least 97%, at least 98%, at least 99%, or 100% identity to SEQ ID NO:54; and VL4 comprises an amino acid sequence having at least 80%, at least 85%, at least 90%, at least 91%, at least 92%, at least 93%, at least 94%, at least 95%, at least 96%, at least 97%, at least 98%, at least 99%, or 100% identity to SEQ ID NO:275. In some aspects, VH1 comprises the amino acid sequence of SEQ ID NO:271; VH2 and VH3 comprise the amino acid sequence of SEQ ID NO:58; VH4 comprises the amino acid sequence of SEQ ID NO:279; VL1 comprises the amino acid sequence of SEQ ID NO:267; VL2 and VL3 comprise the amino acid sequence of SEQ ID NO:54; and VL4 comprises the amino acid sequence of SEQ ID NO:275. In some aspects, L1-L16 comprise the amino acid sequence of any one of SEQ ID NOs:1-34, wherein SEQ ID NO:1 has the amino acid sequence of G, SEQ ID NO:2 has the amino acid sequence of A, SEQ ID NO:3 has the amino acid sequence of GSS and SEQ ID NO:4 has the amino acid sequence of ASG. In some aspects, L1 or L4 and L7 or L10 comprise the amino acid sequence of SEQ ID NO:6; L2 or L5 and L8 or L11 comprise the amino acid sequence of SEQ ID NO:27; and L3 or L6 and L9 or L12 comprise the amino acid sequence of SEQ ID NO:6. In some aspects, L1 or L5 and L9 or L13 comprise the amino acid sequence of SEQ ID NO:6; L2 or L6 and L10 or L14 comprise the amino acid sequence of SEQ ID NO:27; L3 or L7 and L11 or L15 comprise the amino acid sequence of SEQ ID NO:6; and L4 or L8 and L12 or L16 comprise the amino acid sequence of SEQ ID NO:12. In some aspects, Fc comprises a knob-into-hole modification or Fc effector function knockout mutation. In some aspects, Fc comprises an amino acid sequence having at least 80%, at least 85%, at least 90%, at least 91%, at least 92%, at least 93%, at least 94%, at least 95%, at least 96%, at least 97%, at least 98%, at least 99%, or 100% identity to SEQ ID NO:293 or 294. In some aspects, Fc comprises the amino acid sequence of SEQ ID NO:293 or 294. In some aspects, the sequence has a mutation at N62, for example, N62Q or N62Q at, for example, SEQ ID NO:279. In some preferred aspects, VH1, VH2, VH3, VH4, VL1, VL2, VL3 and VL4 have at least 90% identity with the corresponding amino acid sequences specified above, optionally with (i) an Fc having at least 90% identity with the corresponding amino acid sequence recited above; (ii) one or more linker sequence as specified above; and/or (iii) a mutation at N62 as recited above. In some particularly preferred aspects, VH1, VH2, VH3, VH4, VL1, VL2, VL3 and VL4 comprise or consist of the corresponding amino acid sequences specified above, optionally with (i) an Fc comprising or consisting of the corresponding amino acid sequence recited above; (ii) one or more linker sequence as specified above; and/or (iii) a mutation at N62 as recited above.

[0774] In some aspects, the first polypeptide comprises an amino acid sequence having at least 80%, at least 85%, at least 90%, at least 91%, at least 92%, at least 93%, at least 94%, at least 95%, at least 96%, at least 97%, at least 98%, at least 99%, or 100% identity to SEQ ID NO:415; and the second polypeptide comprises an amino acid sequence having at least 80%, at least 85%, at least 90%, at least 91%, at least 92%, at least 93%, at least 94%, at least 95%, at least 96%, at least 97%, at least 98%, at least 99%, or 100% identity to SEQ ID NO:417. In some aspects, the first polypeptide has at least 90% identity to SEQ ID NO:415 and the second polypeptide has at least 90% identity to SEQ ID NO:417. In some aspects, the first polypeptide comprises the amino acid sequence of SEQ ID NO:415; and the second polypeptide comprises the amino acid sequence of SEQ ID NO:417. In some aspects, the first polypeptide comprises an amino acid sequence encoded by a polynucleotide having at least 80%, at least 85%, at least 90%, at least 91%, at least 92%, at least 93%, at least 94%, at least 95%, at least 96%, at least 97%, at least 98%, at least 99%, or 100% identity to SEQ ID NO:416; and the second polypeptide comprises an amino acid sequence encoded by a polynucleotide having at least 80%, at least 85%, at least 90%, at least 91%, at least 92%, at least 93%, at least 94%, at least 95%, at least 96%, at least 97%, at least 98%, at least 99%, or 100% identity to SEQ ID NO:418. In some aspects, the first polypeptide comprises an amino acid sequence encoded by a polynucleotide having at least 90% identity to SEQ ID NO:416 and the second polypeptide comprises an amino acid sequence encoded by a polynucleotide having at least 90% identity to SEQ ID NO:418. In some aspects, the first polypeptide comprises an amino acid sequence encoded by the polynucleotide of SEQ ID NO:416; and the second polypeptide comprises an amino acid sequence encoded by the polynucleotide of SEQ ID NO:418.

[0775] In some aspects, VH1 comprises an amino acid sequence having at least 80%, at least 85%, at least 90%, at least 91%, at least 92%, at least 93%, at least 94%, at least 95%, at least 96%, at least 97%, at least 98%, at least 99%, or 100% identity to SEQ ID NO:271; VH2 and VH4 comprise an amino acid sequence having at least 80%, at least 85%, at least 90%, at least 91%, at least 92%, at least 93%, at least 94%, at least 95%, at least 96%, at least 97%, at least 98%, at least 99%, or 100% identity to SEQ ID NO:58; VH3 comprises an amino acid sequence having at least 80%, at least 85%, at least 90%, at least 91%, at least 92%, at least 93%, at least 94%, at least 95%, at least 96%, at least 97%, at least 98%, at least 99%, or 100% identity to SEQ ID NO:279; VL1 comprises an amino acid sequence having at least 80%, at least 85%, at least 90%, at least 91%, at least 92%, at least 93%, at least 94%, at least 95%, at least 96%, at least 97%, at least 98%, at least 99%, or 100% identity to SEQ ID NO:267; VL2 and VL4 comprise an amino acid sequence having at least 80%, at least 85%, at least 90%, at least 91%, at least 92%, at least 93%, at least 94%, at least 95%, at least 96%, at least 97%, at least 98%, at least 99%, or 100% identity to SEQ ID NO:54; and VL3 comprises an amino acid sequence having at least 80%, at least 85%, at least 90%, at least 91%, at least 92%, at least 93%, at least 94%, at least 95%, at least 96%, at least 97%, at least 98%, at least 99%, or 100% identity to SEQ ID NO:275. In some aspects, VH1 comprises the amino acid sequence of SEQ ID NO:271; VH2 and VH4 comprise the amino acid sequence of SEQ ID NO:58; VH3 comprises the amino acid sequence of SEQ ID NO:279; VL1 comprises the amino acid sequence of SEQ ID NO:267; VL2 and VL4 comprise the amino acid sequence of SEQ ID NO:54; and VL3 comprises the amino acid sequence of SEQ ID NO:275. In some aspects, L1-L16 comprise the amino acid sequence of any one of SEQ ID NOs:1-34, wherein SEQ ID NO:1 has the amino acid sequence of G, SEQ ID NO:2 has the amino acid sequence of A, SEQ ID NO:3 has the amino acid sequence of GSS and SEQ ID NO:4 has the amino acid sequence of ASG. In some aspects, L1 or L4 and L7 or L10 comprise the amino acid sequence of SEQ ID NO:6; L2 or L5 and L8 or L11 comprise the amino acid sequence of SEQ ID NO:27; and L3 or L6 and L9 or L12 comprise the amino acid sequence of SEQ ID NO:6. In some aspects, L1 or L5 and L9 or L13 comprise the amino acid sequence of SEQ ID NO:6; L2 or L6 and L10 or L14 comprise the amino acid sequence of SEQ ID NO:27; L3 or L7 and L11 or L15 comprise the amino acid sequence of SEQ ID NO:6; and L4 or L8 and L12 or L16 comprise the amino acid sequence of SEQ ID NO:12. In some aspects, Fc comprises a knob-into-hole modification or Fc effector function knockout mutation. In some aspects, Fc comprises an amino acid sequence having at least 80%, at least 85%, at least 90%, at least 91%, at least 92%, at least 93%, at least 94%, at least 95%, at least 96%, at least 97%, at least 98%, at least 99%, or 100% identity to SEQ ID NO:293 or 294. In some aspects, Fc comprises the amino acid sequence of SEQ ID NO:293 or 294. In some aspects, the sequence has a mutation at N62, for example, N62Q or N62Q at, for example, SEQ ID NO:279. In some preferred aspects, VH1, VH2, VH3, VH4, VL1, VL2, VL3 and VL4 have at least 90% identity with the corresponding amino acid sequences specified above, optionally with (i) an Fc having at least 90% identity with the corresponding amino acid sequence recited above; (ii) one or more linker sequence as specified above; and/or (iii) a mutation at N62 as recited above. In some particularly preferred aspects, VH1, VH2, VH3, VH4, VL1, VL2, VL3 and VL4 comprise or consist of the corresponding amino acid sequences specified above, optionally with (i) an Fc comprising or consisting of the corresponding amino acid sequence recited above; (ii) one or more linker sequence as specified above; and/or (iii) a mutation at N62 as recited above.

[0776] In some aspects, the first polypeptide comprises an amino acid sequence having at least 80%, at least 85%, at least 90%, at least 91%, at least 92%, at least 93%, at least 94%, at least 95%, at least 96%, at least 97%, at least 98%, at least 99%, or 100% identity to SEQ ID NO:419; and the second polypeptide comprises an amino acid sequence having at least 80%, at least 85%, at least 90%, at least 91%, at least 92%, at least 93%, at least 94%, at least 95%, at least 96%, at least 97%, at least 98%, at least 99%, or 100% identity to SEQ ID NO:421. In some aspects, the first polypeptide has at least 90% identity to SEQ ID NO:419 and the second polypeptide has at least 90% identity to SEQ ID NO:421. In some aspects, the first polypeptide comprises the amino acid sequence of SEQ ID NO:419; and the second polypeptide comprises the amino acid sequence of SEQ ID NO:421. In some aspects, the first polypeptide comprises an amino acid sequence encoded by a polynucleotide having at least 80%, at least 85%, at least 90%, at least 91%, at least 92%, at least 93%, at least 94%, at least 95%, at least 96%, at least 97%, at least 98%, at least 99%, or 100% identity to SEQ ID NO:420; and the second polypeptide comprises an amino acid sequence encoded by a polynucleotide having at least 80%, at least 85%, at least 90%, at least 91%, at least 92%, at least 93%, at least 94%, at least 95%, at least 96%, at least 97%, at least 98%, at least 99%, or 100% identity to SEQ ID NO:422. In some aspects, the first polypeptide comprises an amino acid sequence encoded by a polynucleotide having at least 90% identity to SEQ ID NO:420 and the second polypeptide comprises an amino acid sequence encoded by a polynucleotide having at least 90% identity to SEQ ID NO:422. In some aspects, the first polypeptide comprises an amino acid sequence encoded by the polynucleotide of SEQ ID NO:420; and the second polypeptide comprises an amino acid sequence encoded by the polynucleotide of SEQ ID NO:422.

[0777] In some aspects, VH1 comprises an amino acid sequence having at least 80%, at least 85%, at least 90%, at least 91%, at least 92%, at least 93%, at least 94%, at least 95%, at least 96%, at least 97%, at least 98%, at least 99%, or 100% identity to SEQ ID NO:271; VH2 and VH3 comprise an amino acid sequence having at least 80%, at least 85%, at least 90%, at least 91%, at least 92%, at least 93%, at least 94%, at least 95%, at least 96%, at least 97%, at least 98%, at least 99%, or 100% identity to SEQ ID NO:279; VH4 comprises an amino acid sequence having at least 80%, at least 85%, at least 90%, at least 91%, at least 92%, at least 93%, at least 94%, at least 95%, at least 96%, at least 97%, at least 98%, at least 99%, or 100% identity to SEQ ID NO:58; VL1 comprises an amino acid sequence having at least 80%, at least 85%, at least 90%, at least 91%, at least 92%, at least 93%, at least 94%, at least 95%, at least 96%, at least 97%, at least 98%, at least 99%, or 100% identity to SEQ ID NO:267; VL2 and VL3 comprise an amino acid sequence having at least 80%, at least 85%, at least 90%, at least 91%, at least 92%, at least 93%, at least 94%, at least 95%, at least 96%, at least 97%, at least 98%, at least 99%, or 100% identity to SEQ ID NO:275; and VL4 comprises an amino acid sequence having at least 80%, at least 85%, at least 90%, at least 91%, at least 92%, at least 93%, at least 94%, at least 95%, at least 96%, at least 97%, at least 98%, at least 99%, or 100% identity to SEQ ID NO:54. In some aspects, VH1 comprises the amino acid sequence of SEQ ID NO:271; VH2 and VH3 comprise the amino acid sequence of SEQ ID NO:279; VH4 comprises the amino acid sequence of SEQ ID NO:58; VL1 comprises the amino acid sequence of SEQ ID NO:267; VL2 and VL3 comprise the amino acid sequence of SEQ ID NO:275; and VL4 comprises the amino acid sequence of SEQ ID NO:54. In some aspects, L1-L16 comprise the amino acid sequence of any one of SEQ ID NOs:1-34, wherein SEQ ID NO:1 has the amino acid sequence of G, SEQ ID NO:2 has the amino acid sequence of A, SEQ ID NO:3 has the amino acid sequence of GSS and SEQ ID NO:4 has the amino acid sequence of ASG. In some aspects, L1 or L4 and L7 or L10 comprise the amino acid sequence of SEQ ID NO:6; L2 or L5 and L8 or L11 comprise the amino acid sequence of SEQ ID NO:27; and L3 or L6 and L9 or L12 comprise the amino acid sequence of SEQ ID NO:6. In some aspects, L1 or L5 and L9 or L13 comprise the amino acid sequence of SEQ ID NO:6; L2 or L6 and L10 or L14 comprise the amino acid sequence of SEQ ID NO:27; L3 or L7 and L11 or L15 comprise the amino acid sequence of SEQ ID NO:6; and L4 or L8 and L12 or L16 comprise the amino acid sequence of SEQ ID NO:12. In some aspects, Fc comprises a knob-into-hole modification or Fe effector function knockout mutation. In some aspects, Fc comprises an amino acid sequence having at least 80%, at least 85%, at least 90%, at least 91%, at least 92%, at least 93%, at least 94%, at least 95%, at least 96%, at least 97%, at least 98%, at least 99%, or 100% identity to SEQ ID NO:293 or 294. In some aspects, Fc comprises the amino acid sequence of SEQ ID NO:293 or 294. In some aspects, the sequence has a mutation at N62, for example, N62Q or N62Q at, for example, SEQ ID NO:279. In some preferred aspects, VH1, VH2, VH3, VH4, VL1, VL2, VL3 and VL4 have at least 90% identity with the corresponding amino acid sequences specified above, optionally with (i) an Fc having at least 90% identity with the corresponding amino acid sequence recited above; (ii) one or more linker sequence as specified above; and/or (iii) a mutation at N62 as recited above. In some particularly preferred aspects, VH1, VH2, VH3, VH4, VL1, VL2, VL3 and VL4 comprise or consist of the corresponding amino acid sequences specified above, optionally with (i) an Fc comprising or consisting of the corresponding amino acid sequence recited above; (ii) one or more linker sequence as specified above; and/or (iii) a mutation at N62 as recited above.

[0778] In some aspects, the first polypeptide comprises an amino acid sequence having at least 80%, at least 85%, at least 90%, at least 91%, at least 92%, at least 93%, at least 94%, at least 95%, at least 96%, at least 97%, at least 98%, at least 99%, or 100% identity to SEQ ID NO:423; and the second polypeptide comprises an amino acid sequence having at least 80%, at least 85%, at least 90%, at least 91%, at least 92%, at least 93%, at least 94%, at least 95%, at least 96%, at least 97%, at least 98%, at least 99%, or 100% identity to SEQ ID NO:425. In some aspects, the first polypeptide has at least 90% identity to SEQ ID NO:423 and the second polypeptide has at least 90% identity to SEQ ID NO:425. In some aspects, the first polypeptide comprises the amino acid sequence of SEQ ID NO:423; and the second polypeptide comprises the amino acid sequence of SEQ ID NO:425. In some aspects, the first polypeptide comprises an amino acid sequence encoded by a polynucleotide having at least 80%, at least 85%, at least 90%, at least 91%, at least 92%, at least 93%, at least 94%, at least 95%, at least 96%, at least 97%, at least 98%, at least 99%, or 100% identity to SEQ ID NO:424; and the second polypeptide comprises an amino acid sequence encoded by a polynucleotide having at least 80%, at least 85%, at least 90%, at least 91%, at least 92%, at least 93%, at least 94%, at least 95%, at least 96%, at least 97%, at least 98%, at least 99%, or 100% identity to SEQ ID NO:426. In some aspects, the first polypeptide comprises an amino acid sequence encoded by a polynucleotide having at least 90% identity to SEQ ID NO:424 and the second polypeptide comprises an amino acid sequence encoded by a polynucleotide having at least 90% identity to SEQ ID NO:426. In some aspects, the first polypeptide comprises an amino acid sequence encoded by the polynucleotide of SEQ ID NO:424; and the second polypeptide comprises an amino acid sequence encoded by the polynucleotide of SEQ ID NO:426.

[0779] In some aspects, VH2 comprises an amino acid sequence having at least 80%, at least 85%, at least 90%, at least 91%, at least 92%, at least 93%, at least 94%, at least 95%, at least 96%, at least 97%, at least 98%, at least 99%, or 100% identity to SEQ ID NO:271; VH1 and VH3 comprise an amino acid sequence having at least 80%, at least 85%, at least 90%, at least 91%, at least 92%, at least 93%, at least 94%, at least 95%, at least 96%, at least 97%, at least 98%, at least 99%, or 100% identity to SEQ ID NO:279; VH4 comprises an amino acid sequence having at least 80%, at least 85%, at least 90%, at least 91%, at least 92%, at least 93%, at least 94%, at least 95%, at least 96%, at least 97%, at least 98%, at least 99%, or 100% identity to SEQ ID NO:58; VL2 comprises an amino acid sequence having at least 80%, at least 85%, at least 90%, at least 91%, at least 92%, at least 93%, at least 94%, at least 95%, at least 96%, at least 97%, at least 98%, at least 99%, or 100% identity to SEQ ID NO:267; VL1 and VL3 comprise an amino acid sequence having at least 80%, at least 85%, at least 90%, at least 91%, at least 92%, at least 93%, at least 94%, at least 95%, at least 96%, at least 97%, at least 98%, at least 99%, or 100% identity to SEQ ID NO:275; and VL4 comprises an amino acid sequence having at least 80%, at least 85%, at least 90%, at least 91%, at least 92%, at least 93%, at least 94%, at least 95%, at least 96%, at least 97%, at least 98%, at least 99%, or 100% identity to SEQ ID NO:54. In some aspects, VH2 comprises the amino acid sequence of SEQ ID NO:271; VH1 and VH3 comprise the amino acid sequence of SEQ ID NO:279; VH4 comprises the amino acid sequence of SEQ ID NO:58; VL2 comprises the amino acid sequence of SEQ ID NO:267; VL1 and VL3 comprise the amino acid sequence of SEQ ID NO:275; and VL4 comprises the amino acid sequence of SEQ ID NO:54. In some aspects, L1-L16 comprise the amino acid sequence of any one of SEQ ID NOs:1-34, wherein SEQ ID NO:1 has the amino acid sequence of G, SEQ ID NO:2 has the amino acid sequence of A, SEQ ID NO:3 has the amino acid sequence of GSS and SEQ ID NO:4 has the amino acid sequence of ASG. In some aspects, L1 or L4 and L7 or L10 comprise the amino acid sequence of SEQ ID NO:6; L2 or L5 and L8 or L11 comprise the amino acid sequence of SEQ ID NO:27; and L3 or L6 and L9 or L12 comprise the amino acid sequence of SEQ ID NO:6. In some aspects, L1 or L5 and L9 or L13 comprise the amino acid sequence of SEQ ID NO:6; L2 or L6 and L10 or L14 comprise the amino acid sequence of SEQ ID NO:27; L3 or L7 and L11 or L15 comprise the amino acid sequence of SEQ ID NO:6; and L4 or L8 and L12 or L16 comprise the amino acid sequence of SEQ ID NO:12. In some aspects, Fc comprises a knob-into-hole modification or Fc effector function knockout mutation. In some aspects, Fc comprises an amino acid sequence having at least 80%, at least 85%, at least 90%, at least 91%, at least 92%, at least 93%, at least 94%, at least 95%, at least 96%, at least 97%, at least 98%, at least 99%, or 100% identity to SEQ ID NO:293 or 294. In some aspects, Fc comprises the amino acid sequence of SEQ ID NO:293 or 294. In some aspects, the sequence has a mutation at N62, for example, N62Q or N62Q at, for example, SEQ ID NO:279. In some preferred aspects, VH1, VH2, VH3, VH4, VL1, VL2, VL3 and VL4 have at least 90% identity with the corresponding amino acid sequences specified above, optionally with (i) an Fc having at least 90% identity with the corresponding amino acid sequence recited above; (ii) one or more linker sequence as specified above; and/or (iii) a mutation at N62 as recited above. In some particularly preferred aspects, VH1, VH2, VH3, VH4, VL1, VL2, VL3 and VL4 comprise or consist of the corresponding amino acid sequences specified above, optionally with (i) an Fc comprising or consisting of the corresponding amino acid sequence recited above; (ii) one or more linker sequence as specified above; and/or (iii) a mutation at N62 as recited above.

[0780] In some aspects, the first polypeptide comprises an amino acid sequence having at least 80%, at least 85%, at least 90%, at least 91%, at least 92%, at least 93%, at least 94%, at least 95%, at least 96%, at least 97%, at least 98%, at least 99%, or 100% identity to SEQ ID NO:427; and the second polypeptide comprises an amino acid sequence having at least 80%, at least 85%, at least 90%, at least 91%, at least 92%, at least 93%, at least 94%, at least 95%, at least 96%, at least 97%, at least 98%, at least 99%, or 100% identity to SEQ ID NO:429. In some aspects, the first polypeptide has at least 90% identity to SEQ ID NO:427 and the second polypeptide has at least 90% identity to SEQ ID NO:429. In some aspects, the first polypeptide comprises the amino acid sequence of SEQ ID NO:427; and the second polypeptide comprises the amino acid sequence of SEQ ID NO:429. In some aspects, the first polypeptide comprises an amino acid sequence encoded by a polynucleotide having at least 80%, at least 85%, at least 90%, at least 91%, at least 92%, at least 93%, at least 94%, at least 95%, at least 96%, at least 97%, at least 98%, at least 99%, or 100% identity to SEQ ID NO:428; and the second polypeptide comprises an amino acid sequence encoded by a polynucleotide having at least 80%, at least 85%, at least 90%, at least 91%, at least 92%, at least 93%, at least 94%, at least 95%, at least 96%, at least 97%, at least 98%, at least 99%, or 100% identity to SEQ ID NO:430. In some aspects, the first polypeptide comprises an amino acid sequence encoded by a polynucleotide having at least 90% identity to SEQ ID NO:428 and the second polypeptide comprises an amino acid sequence encoded by a polynucleotide having at least 90% identity to SEQ ID NO:430. In some aspects, the first polypeptide comprises an amino acid sequence encoded by the polynucleotide of SEQ ID NO:428; and the second polypeptide comprises an amino acid sequence encoded by the polynucleotide of SEQ ID NO:430.

[0781] In some aspects, VH1 comprises an amino acid sequence having at least 80%, at least 85%, at least 90%, at least 91%, at least 92%, at least 93%, at least 94%, at least 95%, at least 96%, at least 97%, at least 98%, at least 99%, or 100% identity to SEQ ID NO:58; VH2 and VH4 comprise an amino acid sequence having at least 80%, at least 85%, at least 90%, at least 91%, at least 92%, at least 93%, at least 94%, at least 95%, at least 96%, at least 97%, at least 98%, at least 99%, or 100% identity to SEQ ID NO:279; VH3 comprises an amino acid sequence having at least 80%, at least 85%, at least 90%, at least 91%, at least 92%, at least 93%, at least 94%, at least 95%, at least 96%, at least 97%, at least 98%, at least 99%, or 100% identity to SEQ ID NO:271; VL1 comprises an amino acid sequence having at least 80%, at least 85%, at least 90%, at least 91%, at least 92%, at least 93%, at least 94%, at least 95%, at least 96%, at least 97%, at least 98%, at least 99%, or 100% identity to SEQ ID NO:54; VL2 and VL4 comprise an amino acid sequence having at least 80%, at least 85%, at least 90%, at least 91%, at least 92%, at least 93%, at least 94%, at least 95%, at least 96%, at least 97%, at least 98%, at least 99%, or 100% identity to SEQ ID NO:275; and VL3 comprises an amino acid sequence having at least 80%, at least 85%, at least 90%, at least 91%, at least 92%, at least 93%, at least 94%, at least 95%, at least 96%, at least 97%, at least 98%, at least 99%, or 100% identity to SEQ ID NO:267. In some aspects, VH1 comprises the amino acid sequence of SEQ ID NO:58; VH2 and VH4 comprise the amino acid sequence of SEQ ID NO:279; VH3 comprises the amino acid sequence of SEQ ID NO:271; VL1 comprises the amino acid sequence of SEQ ID NO:54; VL2 and VL4 comprise the amino acid sequence of SEQ ID NO:275; and VL3 comprises the amino acid sequence of SEQ ID NO:267. In some aspects, L1-L16 comprise the amino acid sequence of any one of SEQ ID NOs:1-34, wherein SEQ ID NO:1 has the amino acid sequence of G, SEQ ID NO:2 has the amino acid sequence of A, SEQ ID NO:3 has the amino acid sequence of GSS and SEQ ID NO:4 has the amino acid sequence of ASG. In some aspects, L1 or L4 and L7 or L10 comprise the amino acid sequence of SEQ ID NO:6; L2 or L5 and L8 or L11 comprise the amino acid sequence of SEQ ID NO:27; and L3 or L6 and L9 or L12 comprise the amino acid sequence of SEQ ID NO:6. In some aspects, L1 or L5 and L9 or L13 comprise the amino acid sequence of SEQ ID NO:6; L2 or L6 and L10 or L14 comprise the amino acid sequence of SEQ ID NO:27; L3 or L7 and L11 or L15 comprise the amino acid sequence of SEQ ID NO:6; and L4 or L8 and L12 or L16 comprise the amino acid sequence of SEQ ID NO:12. In some aspects, Fc comprises a knob-into-hole modification or Fc effector function knockout mutation. In some aspects, Fc comprises an amino acid sequence having at least 80%, at least 85%, at least 90%, at least 91%, at least 92%, at least 93%, at least 94%, at least 95%, at least 96%, at least 97%, at least 98%, at least 99%, or 100% identity to SEQ ID NO:293 or 294. In some aspects, Fc comprises the amino acid sequence of SEQ ID NO:293 or 294. In some aspects, the sequence has a mutation at N62, for example, N62Q or N62Q at, for example, SEQ ID NO:279. In some preferred aspects, VH1, VH2, VH3, VH4, VL1, VL2, VL3 and VL4 have at least 90% identity with the corresponding amino acid sequences specified above, optionally with (i) an Fc having at least 90% identity with the corresponding amino acid sequence recited above; (ii) one or more linker sequence as specified above; and/or (iii) a mutation at N62 as recited above. In some particularly preferred aspects, VH1, VH2, VH3, VH4, VL1, VL2, VL3 and VL4 comprise or consist of the corresponding amino acid sequences specified above, optionally with (i) an Fc comprising or consisting of the corresponding amino acid sequence recited above; (ii) one or more linker sequence as specified above; and/or (iii) a mutation at N62 as recited above.

[0782] In some aspects, the first polypeptide comprises an amino acid sequence having at least 80%, at least 85%, at least 90%, at least 91%, at least 92%, at least 93%, at least 94%, at least 95%, at least 96%, at least 97%, at least 98%, at least 99%, or 100% identity to SEQ ID NO:431; and the second polypeptide comprises an amino acid sequence having at least 80%, at least 85%, at least 90%, at least 91%, at least 92%, at least 93%, at least 94%, at least 95%, at least 96%, at least 97%, at least 98%, at least 99%, or 100% identity to SEQ ID NO:433. In some aspects, the first polypeptide has at least 90% identity to SEQ ID NO:431 and the second polypeptide has at least 90% identity to SEQ ID NO:433. In some aspects, the first polypeptide comprises the amino acid sequence of SEQ ID NO:431; and the second polypeptide comprises the amino acid sequence of SEQ ID NO:433. In some aspects, the first polypeptide comprises an amino acid sequence encoded by a polynucleotide having at least 80%, at least 85%, at least 90%, at least 91%, at least 92%, at least 93%, at least 94%, at least 95%, at least 96%, at least 97%, at least 98%, at least 99%, or 100% identity to SEQ ID NO:432; and the second polypeptide comprises an amino acid sequence encoded by a polynucleotide having at least 80%, at least 85%, at least 90%, at least 91%, at least 92%, at least 93%, at least 94%, at least 95%, at least 96%, at least 97%, at least 98%, at least 99%, or 100% identity to SEQ ID NO:434. In some aspects, the first polypeptide comprises an amino acid sequence encoded by a polynucleotide having at least 90% identity to SEQ ID NO:432 and the second polypeptide comprises an amino acid sequence encoded by a polynucleotide having at least 90% identity to SEQ ID NO:434. In some aspects, the first polypeptide comprises an amino acid sequence encoded by the polynucleotide of SEQ ID NO:432; and the second polypeptide comprises an amino acid sequence encoded by the polynucleotide of SEQ ID NO:434.

[0783] In some aspects, VH1 comprises an amino acid sequence having at least 80%, at least 85%, at least 90%, at least 91%, at least 92%, at least 93%, at least 94%, at least 95%, at least 96%, at least 97%, at least 98%, at least 99%, or 100% identity to SEQ ID NO:58; VH2 and VH3 comprise an amino acid sequence having at least 80%, at least 85%, at least 90%, at least 91%, at least 92%, at least 93%, at least 94%, at least 95%, at least 96%, at least 97%, at least 98%, at least 99%, or 100% identity to SEQ ID NO:279; VH4 comprises an amino acid sequence having at least 80%, at least 85%, at least 90%, at least 91%, at least 92%, at least 93%, at least 94%, at least 95%, at least 96%, at least 97%, at least 98%, at least 99%, or 100% identity to SEQ ID NO:271; VL1 comprises an amino acid sequence having at least 80%, at least 85%, at least 90%, at least 91%, at least 92%, at least 93%, at least 94%, at least 95%, at least 96%, at least 97%, at least 98%, at least 99%, or 100% identity to SEQ ID NO:54; VL2 and VL3 comprise an amino acid sequence having at least 80%, at least 85%, at least 90%, at least 91%, at least 92%, at least 93%, at least 94%, at least 95%, at least 96%, at least 97%, at least 98%, at least 99%, or 100% identity to SEQ ID NO:275; and VL4 comprises an amino acid sequence having at least 80%, at least 85%, at least 90%, at least 91%, at least 92%, at least 93%, at least 94%, at least 95%, at least 96%, at least 97%, at least 98%, at least 99%, or 100% identity to SEQ ID NO:267. In some aspects, VH1 comprises the amino acid sequence of SEQ ID NO:58; VH2 and VH3 comprise the amino acid sequence of SEQ ID NO:279; VH4 comprises the amino acid sequence of SEQ ID NO:271; VL1 comprises the amino acid sequence of SEQ ID NO:54; VL2 and VL3 comprise the amino acid sequence of SEQ ID NO:275; and VL4 comprises the amino acid sequence of SEQ ID NO:267. In some aspects, L1-L16 comprise the amino acid sequence of any one of SEQ ID NOs:1-34, wherein SEQ ID NO:1 has the amino acid sequence of G, SEQ ID NO:2 has the amino acid sequence of A, SEQ ID NO:3 has the amino acid sequence of GSS and SEQ ID NO:4 has the amino acid sequence of ASG. In some aspects, L1 or L4 and L7 or L10 comprise the amino acid sequence of SEQ ID NO:6; L2 or L5 and L8 or L11 comprise the amino acid sequence of SEQ ID NO:27; and L3 or L6 and L9 or L12 comprise the amino acid sequence of SEQ ID NO:6. In some aspects, L1 or L5 and L9 or L13 comprise the amino acid sequence of SEQ ID NO:6; L2 or L6 and L10 or L14 comprise the amino acid sequence of SEQ ID NO:27; L3 or L7 and L11 or L15 comprise the amino acid sequence of SEQ ID NO:6; and L4 or L8 and L12 or L16 comprise the amino acid sequence of SEQ ID NO:12. In some aspects, Fc comprises a knob-into-hole modification or Fc effector function knockout mutation. In some aspects, Fc comprises an amino acid sequence having at least 80%, at least 85%, at least 90%, at least 91%, at least 92%, at least 93%, at least 94%, at least 95%, at least 96%, at least 97%, at least 98%, at least 99%, or 100% identity to SEQ ID NO:293 or 294. In some aspects, Fc comprises the amino acid sequence of SEQ ID NO:293 or 294. In some aspects, the sequence has a mutation at N62, for example, N62Q or N62Q at, for example, SEQ ID NO:279. In some preferred aspects, VH1, VH2, VH3, VH4, VL1, VL2, VL3 and VL4 have at least 90% identity with the corresponding amino acid sequences specified above, optionally with (i) an Fc having at least 90% identity with the corresponding amino acid sequence recited above; (ii) one or more linker sequence as specified above; and/or (iii) a mutation at N62 as recited above. In some particularly preferred aspects, VH1, VH2, VH3, VH4, VL1, VL2, VL3 and VL4 comprise or consist of the corresponding amino acid sequences specified above, optionally with (i) an Fc comprising or consisting of the corresponding amino acid sequence recited above; (ii) one or more linker sequence as specified above; and/or (iii) a mutation at N62 as recited above.

[0784] In some aspects, the first polypeptide comprises an amino acid sequence having at least 80%, at least 85%, at least 90%, at least 91%, at least 92%, at least 93%, at least 94%, at least 95%, at least 96%, at least 97%, at least 98%, at least 99%, or 100% identity to SEQ ID NO:435; and the second polypeptide comprises an amino acid sequence having at least 80%, at least 85%, at least 90%, at least 91%, at least 92%, at least 93%, at least 94%, at least 95%, at least 96%, at least 97%, at least 98%, at least 99%, or 100% identity to SEQ ID NO:437. In some aspects, the first polypeptide has at least 90% identity to SEQ ID NO:435 and the second polypeptide has at least 90% identity to SEQ ID NO:437. In some aspects, the first polypeptide comprises the amino acid sequence of SEQ ID NO:435; and the second polypeptide comprises the amino acid sequence of SEQ ID NO:437. In some aspects, the first polypeptide comprises an amino acid sequence encoded by a polynucleotide having at least 80%, at least 85%, at least 90%, at least 91%, at least 92%, at least 93%, at least 94%, at least 95%, at least 96%, at least 97%, at least 98%, at least 99%, or 100% identity to SEQ ID NO:436; and the second polypeptide comprises an amino acid sequence encoded by a polynucleotide having at least 80%, at least 85%, at least 90%, at least 91%, at least 92%, at least 93%, at least 94%, at least 95%, at least 96%, at least 97%, at least 98%, at least 99%, or 100% identity to SEQ ID NO:438. In some aspects, the first polypeptide comprises an amino acid sequence encoded by a polynucleotide having at least 90% identity to SEQ ID NO:436 and the second polypeptide comprises an amino acid sequence encoded by a polynucleotide having at least 90% identity to SEQ ID NO:438. In some aspects, the first polypeptide comprises an amino acid sequence encoded by the polynucleotide of SEQ ID NO:436; and the second polypeptide comprises an amino acid sequence encoded by the polynucleotide of SEQ ID NO:438.

[0785] In some aspects, VH1 comprises an amino acid sequence having at least 80%, at least 85%, at least 90%, at least 91%, at least 92%, at least 93%, at least 94%, at least 95%, at least 96%, at least 97%, at least 98%, at least 99%, or 100% identity to SEQ ID NO:58; VH2 and VH3 comprise an amino acid sequence having at least 80%, at least 85%, at least 90%, at least 91%, at least 92%, at least 93%, at least 94%, at least 95%, at least 96%, at least 97%, at least 98%, at least 99%, or 100% identity to SEQ ID NO:287; VH4 comprises an amino acid sequence having at least 80%, at least 85%, at least 90%, at least 91%, at least 92%, at least 93%, at least 94%, at least 95%, at least 96%, at least 97%, at least 98%, at least 99%, or 100% identity to SEQ ID NO:279; VL1 comprises an amino acid sequence having at least 80%, at least 85%, at least 90%, at least 91%, at least 92%, at least 93%, at least 94%, at least 95%, at least 96%, at least 97%, at least 98%, at least 99%, or 100% identity to SEQ ID NO:54; VL2 and VL3 comprise an amino acid sequence having at least 80%, at least 85%, at least 90%, at least 91%, at least 92%, at least 93%, at least 94%, at least 95%, at least 96%, at least 97%, at least 98%, at least 99%, or 100% identity to SEQ ID NO:283; and VL4 comprises an amino acid sequence having at least 80%, at least 85%, at least 90%, at least 91%, at least 92%, at least 93%, at least 94%, at least 95%, at least 96%, at least 97%, at least 98%, at least 99%, or 100% identity to SEQ ID NO:275. In some aspects, VH1 comprises the amino acid sequence of SEQ ID NO:58; VH2 and VH3 comprise the amino acid sequence of SEQ ID NO:287; VH4 comprises the amino acid sequence of SEQ ID NO:279; VL1 comprises the amino acid sequence of SEQ ID NO:54; VL2 and VL3 comprise the amino acid sequence of SEQ ID NO:283; and VL4 comprises the amino acid sequence of SEQ ID NO:275. In some aspects, L1-L16 comprise the amino acid sequence of any one of SEQ ID NOs:1-34, wherein SEQ ID NO:1 has the amino acid sequence of G, SEQ ID NO:2 has the amino acid sequence of A, SEQ ID NO:3 has the amino acid sequence of GSS and SEQ ID NO:4 has the amino acid sequence of ASG. In some aspects, L1 or L4 and L7 or L10 comprise the amino acid sequence of SEQ ID NO:6; L2 or L5 and L8 or L11 comprise the amino acid sequence of SEQ ID NO:27; and L3 or L6 and L9 or L12 comprise the amino acid sequence of SEQ ID NO:6. In some aspects, L1 or L5 and L9 or L13 comprise the amino acid sequence of SEQ ID NO:6; L2 or L6 and L10 or L14 comprise the amino acid sequence of SEQ ID NO:27; L3 or L7 and L11 or L15 comprise the amino acid sequence of SEQ ID NO:6; and L4 or L8 and L12 or L16 comprise the amino acid sequence of SEQ ID NO:12. In some aspects, Fc comprises a knob-into-hole modification or Fc effector function knockout mutation. In some aspects, Fc comprises an amino acid sequence having at least 80%, at least 85%, at least 90%, at least 91%, at least 92%, at least 93%, at least 94%, at least 95%, at least 96%, at least 97%, at least 98%, at least 99%, or 100% identity to SEQ ID NO:293 or 294. In some aspects, Fc comprises the amino acid sequence of SEQ ID NO:293 or 294. In some aspects, the sequence has a mutation at N62, for example, N62Q or N62Q at, for example, SEQ ID NO:279. In some preferred aspects, VH1, VH2, VH3, VH4, VL1, VL2, VL3 and VL4 have at least 90% identity with the corresponding amino acid sequences specified above, optionally with (i) an Fc having at least 90% identity with the corresponding amino acid sequence recited above; (ii) one or more linker sequence as specified above; and/or (iii) a mutation at N62 as recited above. In some particularly preferred aspects, VH1, VH2, VH3, VH4, VL1, VL2, VL3 and VL4 comprise or consist of the corresponding amino acid sequences specified above, optionally with (i) an Fc comprising or consisting of the corresponding amino acid sequence recited above; (ii) one or more linker sequence as specified above; and/or (iii) a mutation at N62 as recited above.

[0786] In some aspects, the first polypeptide comprises an amino acid sequence having at least 80%, at least 85%, at least 90%, at least 91%, at least 92%, at least 93%, at least 94%, at least 95%, at least 96%, at least 97%, at least 98%, at least 99%, or 100% identity to SEQ ID NO:439; and the second polypeptide comprises an amino acid sequence having at least 80%, at least 85%, at least 90%, at least 91%, at least 92%, at least 93%, at least 94%, at least 95%, at least 96%, at least 97%, at least 98%, at least 99%, or 100% identity to SEQ ID NO:441. In some aspects, the first polypeptide has at least 90% identity to SEQ ID NO:439 and the second polypeptide has at least 90% identity to SEQ ID NO:441. In some aspects, the first polypeptide comprises the amino acid sequence of SEQ ID NO:439; and the second polypeptide comprises the amino acid sequence of SEQ ID NO:441. In some aspects, the first polypeptide comprises an amino acid sequence encoded by a polynucleotide having at least 80%, at least 85%, at least 90%, at least 91%, at least 92%, at least 93%, at least 94%, at least 95%, at least 96%, at least 97%, at least 98%, at least 99%, or 100% identity to SEQ ID NO:440; and the second polypeptide comprises an amino acid sequence encoded by a polynucleotide having at least 80%, at least 85%, at least 90%, at least 91%, at least 92%, at least 93%, at least 94%, at least 95%, at least 96%, at least 97%, at least 98%, at least 99%, or 100% identity to SEQ ID NO:442. In some aspects, the first polypeptide comprises an amino acid sequence encoded by a polynucleotide having at least 90% identity to SEQ ID NO:440 and the second polypeptide comprises an amino acid sequence encoded by a polynucleotide having at least 90% identity to SEQ ID NO:442. In some aspects, the first polypeptide comprises an amino acid sequence encoded by the polynucleotide of SEQ ID NO:440; and the second polypeptide comprises an amino acid sequence encoded by the polynucleotide of SEQ ID NO:442.

[0787] In some aspects, VH1 comprises an amino acid sequence having at least 80%, at least 85%, at least 90%, at least 91%, at least 92%, at least 93%, at least 94%, at least 95%, at least 96%, at least 97%, at least 98%, at least 99%, or 100% identity to SEQ ID NO:58; VH2 and VH4 comprise an amino acid sequence having at least 80%, at least 85%, at least 90%, at least 91%, at least 92%, at least 93%, at least 94%, at least 95%, at least 96%, at least 97%, at least 98%, at least 99%, or 100% identity to SEQ ID NO:287; VH3 comprises an amino acid sequence having at least 80%, at least 85%, at least 90%, at least 91%, at least 92%, at least 93%, at least 94%, at least 95%, at least 96%, at least 97%, at least 98%, at least 99%, or 100% identity to SEQ ID NO:279; VL1 comprises an amino acid sequence having at least 80%, at least 85%, at least 90%, at least 91%, at least 92%, at least 93%, at least 94%, at least 95%, at least 96%, at least 97%, at least 98%, at least 99%, or 100% identity to SEQ ID NO:54; VL2 and VL4 comprise an amino acid sequence having at least 80%, at least 85%, at least 90%, at least 91%, at least 92%, at least 93%, at least 94%, at least 95%, at least 96%, at least 97%, at least 98%, at least 99%, or 100% identity to SEQ ID NO:283; and VL3 comprises an amino acid sequence having at least 80%, at least 85%, at least 90%, at least 91%, at least 92%, at least 93%, at least 94%, at least 95%, at least 96%, at least 97%, at least 98%, at least 99%, or 100% identity to SEQ ID NO:275. In some aspects, VH1 comprises the amino acid sequence of SEQ ID NO:58; VH2 and VH4 comprise the amino acid sequence of SEQ ID NO:287; VH3 comprises the amino acid sequence of SEQ ID NO:279; VL1 comprises the amino acid sequence of SEQ ID NO:54; VL2 and VL4 comprise the amino acid sequence of SEQ ID NO:283; and VL3 comprises the amino acid sequence of SEQ ID NO:275. In some aspects, L1-L16 comprise the amino acid sequence of any one of SEQ ID NOs:1-34, wherein SEQ ID NO:1 has the amino acid sequence of G, SEQ ID NO:2 has the amino acid sequence of A, SEQ ID NO:3 has the amino acid sequence of GSS and SEQ ID NO:4 has the amino acid sequence of ASG. In some aspects, L1 or L4 and L7 or L10 comprise the amino acid sequence of SEQ ID NO:6; L2 or L5 and L8 or L11 comprise the amino acid sequence of SEQ ID NO:27; and L3 or L6 and L9 or L12 comprise the amino acid sequence of SEQ ID NO:6. In some aspects, L1 or L5 and L9 or L13 comprise the amino acid sequence of SEQ ID NO:6; L2 or L6 and L10 or L14 comprise the amino acid sequence of SEQ ID NO:27; L3 or L7 and L11 or L15 comprise the amino acid sequence of SEQ ID NO:6; and L4 or L8 and L12 or L16 comprise the amino acid sequence of SEQ ID NO:12. In some aspects, Fc comprises a knob-into-hole modification or Fc effector function knockout mutation. In some aspects, Fc comprises an amino acid sequence having at least 80%, at least 85%, at least 90%, at least 91%, at least 92%, at least 93%, at least 94%, at least 95%, at least 96%, at least 97%, at least 98%, at least 99%, or 100% identity to SEQ ID NO:293 or 294. In some aspects, Fc comprises the amino acid sequence of SEQ ID NO:293 or 294. In some aspects, the sequence has a mutation at N62, for example, N62Q or N62Q at, for example, SEQ ID NO:279. In some preferred aspects, VH1, VH2, VH3, VH4, VL1, VL2, VL3 and VL4 have at least 90% identity with the corresponding amino acid sequences specified above, optionally with (i) an Fc having at least 90% identity with the corresponding amino acid sequence recited above; (ii) one or more linker sequence as specified above; and/or (iii) a mutation at N62 as recited above. In some particularly preferred aspects, VH1, VH2, VH3, VH4, VL1, VL2, VL3 and VL4 comprise or consist of the corresponding amino acid sequences specified above, optionally with (i) an Fc comprising or consisting of the corresponding amino acid sequence recited above; (ii) one or more linker sequence as specified above; and/or (iii) a mutation at N62 as recited above.

[0788] In some aspects, the first polypeptide comprises an amino acid sequence having at least 80%, at least 85%, at least 90%, at least 91%, at least 92%, at least 93%, at least 94%, at least 95%, at least 96%, at least 97%, at least 98%, at least 99%, or 100% identity to SEQ ID NO:443; and the second polypeptide comprises an amino acid sequence having at least 80%, at least 85%, at least 90%, at least 91%, at least 92%, at least 93%, at least 94%, at least 95%, at least 96%, at least 97%, at least 98%, at least 99%, or 100% identity to SEQ ID NO:445. In some aspects, the first polypeptide has at least 90% identity to SEQ ID NO:443 and the second polypeptide has at least 90% identity to SEQ ID NO:445. In some aspects, the first polypeptide comprises the amino acid sequence of SEQ ID NO:443; and the second polypeptide comprises the amino acid sequence of SEQ ID NO:445. In some aspects, the first polypeptide comprises an amino acid sequence encoded by a polynucleotide having at least 80%, at least 85%, at least 90%, at least 91%, at least 92%, at least 93%, at least 94%, at least 95%, at least 96%, at least 97%, at least 98%, at least 99%, or 100% identity to SEQ ID NO:444; and the second polypeptide comprises an amino acid sequence encoded by a polynucleotide having at least 80%, at least 85%, at least 90%, at least 91%, at least 92%, at least 93%, at least 94%, at least 95%, at least 96%, at least 97%, at least 98%, at least 99%, or 100% identity to SEQ ID NO:446. In some aspects, the first polypeptide comprises an amino acid sequence encoded by a polynucleotide having at least 90% identity to SEQ ID NO:444 and the second polypeptide comprises an amino acid sequence encoded by a polynucleotide having at least 90% identity to SEQ ID NO:446. In some aspects, the first polypeptide comprises an amino acid sequence encoded by the polynucleotide of SEQ ID NO:444; and the second polypeptide comprises an amino acid sequence encoded by the polynucleotide of SEQ ID NO:446.

[0789] In some aspects, VH1 and VH3 comprise an amino acid sequence having at least 80%, at least 85%, at least 90%, at least 91%, at least 92%, at least 93%, at least 94%, at least 95%, at least 96%, at least 97%, at least 98%, at least 99%, or 100% identity to SEQ ID NO:287; VH2 comprises an amino acid sequence having at least 80%, at least 85%, at least 90%, at least 91%, at least 92%, at least 93%, at least 94%, at least 95%, at least 96%, at least 97%, at least 98%, at least 99%, or 100% identity to SEQ ID NO:58; VH4 comprises an amino acid sequence having at least 80%, at least 85%, at least 90%, at least 91%, at least 92%, at least 93%, at least 94%, at least 95%, at least 96%, at least 97%, at least 98%, at least 99%, or 100% identity to SEQ ID NO:279; VL1 and VL3 comprise an amino acid sequence having at least 80%, at least 85%, at least 90%, at least 91%, at least 92%, at least 93%, at least 94%, at least 95%, at least 96%, at least 97%, at least 98%, at least 99%, or 100% identity to SEQ ID NO:283; VL2 comprises an amino acid sequence having at least 80%, at least 85%, at least 90%, at least 91%, at least 92%, at least 93%, at least 94%, at least 95%, at least 96%, at least 97%, at least 98%, at least 99%, or 100% identity to SEQ ID NO:54; and VL4 comprises an amino acid sequence having at least 80%, at least 85%, at least 90%, at least 91%, at least 92%, at least 93%, at least 94%, at least 95%, at least 96%, at least 97%, at least 98%, at least 99%, or 100% identity to SEQ ID NO:275. In some aspects, VH1 and VH3 comprise the amino acid sequence of SEQ ID NO:287; VH2 comprises the amino acid sequence of SEQ ID NO:58; VH4 comprises the amino acid sequence of SEQ ID NO:279; VL1 and VL3 comprise the amino acid sequence of SEQ ID NO:283; VL2 comprises the amino acid sequence of SEQ ID NO:54; and VL4 comprises the amino acid sequence of SEQ ID NO:275. In some aspects, L1-L16 comprise the amino acid sequence of any one of SEQ ID NOs:1-34, wherein SEQ ID NO:1 has the amino acid sequence of G, SEQ ID NO:2 has the amino acid sequence of A, SEQ ID NO:3 has the amino acid sequence of GSS and SEQ ID NO:4 has the amino acid sequence of ASG. In some aspects, L1 or L4 and L7 or L10 comprise the amino acid sequence of SEQ ID NO:6; L2 or L5 and L8 or L11 comprise the amino acid sequence of SEQ ID NO:27; and L3 or L6 and L9 or L12 comprise the amino acid sequence of SEQ ID NO:6. In some aspects, L1 or L5 and L9 or L13 comprise the amino acid sequence of SEQ ID NO:6; L2 or L6 and L10 or L14 comprise the amino acid sequence of SEQ ID NO:27; L3 or L7 and L11 or L15 comprise the amino acid sequence of SEQ ID NO:6; and L4 or L8 and L12 or L16 comprise the amino acid sequence of SEQ ID NO:12. In some aspects, Fc comprises a knob-into-hole modification or Fc effector function knockout mutation. In some aspects, Fc comprises an amino acid sequence having at least 80%, at least 85%, at least 90%, at least 91%, at least 92%, at least 93%, at least 94%, at least 95%, at least 96%, at least 97%, at least 98%, at least 99%, or 100% identity to SEQ ID NO:293 or 294. In some aspects, Fc comprises the amino acid sequence of SEQ ID NO:293 or 294. In some aspects, the sequence has a mutation at N62, for example, N62Q or N62Q at, for example, SEQ ID NO:279. In some preferred aspects, VH1, VH2, VH3, VH4, VL1, VL2, VL3 and VL4 have at least 90% identity with the corresponding amino acid sequences specified above, optionally with (i) an Fc having at least 90% identity with the corresponding amino acid sequence recited above; (ii) one or more linker sequence as specified above; and/or (iii) a mutation at N62 as recited above. In some particularly preferred aspects, VH1, VH2, VH3, VH4, VL1, VL2, VL3 and VL4 comprise or consist of the corresponding amino acid sequences specified above, optionally with (i) an Fc comprising or consisting of the corresponding amino acid sequence recited above; (ii) one or more linker sequence as specified above; and/or (iii) a mutation at N62 as recited above.

[0790] In some aspects, the first polypeptide comprises an amino acid sequence having at least 80%, at least 85%, at least 90%, at least 91%, at least 92%, at least 93%, at least 94%, at least 95%, at least 96%, at least 97%, at least 98%, at least 99%, or 100% identity to SEQ ID NO:447; and the second polypeptide comprises an amino acid sequence having at least 80%, at least 85%, at least 90%, at least 91%, at least 92%, at least 93%, at least 94%, at least 95%, at least 96%, at least 97%, at least 98%, at least 99%, or 100% identity to SEQ ID NO:449. In some aspects, the first polypeptide has at least 90% identity to SEQ ID NO:447 and the second polypeptide has at least 90% identity to SEQ ID NO:449. In some aspects, the first polypeptide comprises the amino acid sequence of SEQ ID NO:447; and the second polypeptide comprises the amino acid sequence of SEQ ID NO:449. In some aspects, the first polypeptide comprises an amino acid sequence encoded by a polynucleotide having at least 80%, at least 85%, at least 90%, at least 91%, at least 92%, at least 93%, at least 94%, at least 95%, at least 96%, at least 97%, at least 98%, at least 99%, or 100% identity to SEQ ID NO:448; and the second polypeptide comprises an amino acid sequence encoded by a polynucleotide having at least 80%, at least 85%, at least 90%, at least 91%, at least 92%, at least 93%, at least 94%, at least 95%, at least 96%, at least 97%, at least 98%, at least 99%, or 100% identity to SEQ ID NO:450. In some aspects, the first polypeptide comprises an amino acid sequence encoded by a polynucleotide having at least 90% identity to SEQ ID NO:448 and the second polypeptide comprises an amino acid sequence encoded by a polynucleotide having at least 90% identity to SEQ ID NO:450. In some aspects, the first polypeptide comprises an amino acid sequence encoded by the polynucleotide of SEQ ID NO:448; and the second polypeptide comprises an amino acid sequence encoded by the polynucleotide of SEQ ID NO:450.

[0791] In some aspects, VH1 and VH4 comprise an amino acid sequence having at least 80%, at least 85%, at least 90%, at least 91%, at least 92%, at least 93%, at least 94%, at least 95%, at least 96%, at least 97%, at least 98%, at least 99%, or 100% identity to SEQ ID NO:287; VH2 comprises an amino acid sequence having at least 80%, at least 85%, at least 90%, at least 91%, at least 92%, at least 93%, at least 94%, at least 95%, at least 96%, at least 97%, at least 98%, at least 99%, or 100% identity to SEQ ID NO:58; VH3 comprises an amino acid sequence having at least 80%, at least 85%, at least 90%, at least 91%, at least 92%, at least 93%, at least 94%, at least 95%, at least 96%, at least 97%, at least 98%, at least 99%, or 100% identity to SEQ ID NO:279; VL1 and VL4 comprise an amino acid sequence having at least 80%, at least 85%, at least 90%, at least 91%, at least 92%, at least 93%, at least 94%, at least 95%, at least 96%, at least 97%, at least 98%, at least 99%, or 100% identity to SEQ ID NO:283; VL2 comprises an amino acid sequence having at least 80%, at least 85%, at least 90%, at least 91%, at least 92%, at least 93%, at least 94%, at least 95%, at least 96%, at least 97%, at least 98%, at least 99%, or 100% identity to SEQ ID NO:54; and VL3 comprises an amino acid sequence having at least 80%, at least 85%, at least 90%, at least 91%, at least 92%, at least 93%, at least 94%, at least 95%, at least 96%, at least 97%, at least 98%, at least 99%, or 100% identity to SEQ ID NO:275. In some aspects, VH1 and VH4 comprise the amino acid sequence of SEQ ID NO:287; VH2 comprises the amino acid sequence of SEQ ID NO:58; VH3 comprises the amino acid sequence of SEQ ID NO:279; VL1 and VL4 comprise the amino acid sequence of SEQ ID NO:283; VL2 comprises the amino acid sequence of SEQ ID NO:54; and VL3 comprises the amino acid sequence of SEQ ID NO:275. In some aspects, L1-L16 comprise the amino acid sequence of any one of SEQ ID NOs:1-34, wherein SEQ ID NO:1 has the amino acid sequence of G, SEQ ID NO:2 has the amino acid sequence of A, SEQ ID NO:3 has the amino acid sequence of GSS and SEQ ID NO:4 has the amino acid sequence of ASG. In some aspects, L1 or L4 and L7 or L10 comprise the amino acid sequence of SEQ ID NO:6; L2 or L5 and L8 or L11 comprise the amino acid sequence of SEQ ID NO:27; and L3 or L6 and L9 or L12 comprise the amino acid sequence of SEQ ID NO:6. In some aspects, L1 or L5 and L9 or L13 comprise the amino acid sequence of SEQ ID NO:6; L2 or L6 and L10 or L14 comprise the amino acid sequence of SEQ ID NO:27; L3 or L7 and L11 or L15 comprise the amino acid sequence of SEQ ID NO:6; and L4 or L8 and L12 or L16 comprise the amino acid sequence of SEQ ID NO:12. In some aspects, Fc comprises a knob-into-hole modification or Fc effector function knockout mutation. In some aspects, Fc comprises an amino acid sequence having at least 80%, at least 85%, at least 90%, at least 91%, at least 92%, at least 93%, at least 94%, at least 95%, at least 96%, at least 97%, at least 98%, at least 99%, or 100% identity to SEQ ID NO:293 or 294. In some aspects, Fc comprises the amino acid sequence of SEQ ID NO:293 or 294. In some aspects, the sequence has a mutation at N62, for example, N62Q or N62Q at, for example, SEQ ID NO:279. In some preferred aspects, VH1, VH2, VH3, VH4, VL1, VL2, VL3 and VL4 have at least 90% identity with the corresponding amino acid sequences specified above, optionally with (i) an Fc having at least 90% identity with the corresponding amino acid sequence recited above; (ii) one or more linker sequence as specified above; and/or (iii) a mutation at N62 as recited above. In some particularly preferred aspects, VH1, VH2, VH3, VH4, VL1, VL2, VL3 and VL4 comprise or consist of the corresponding amino acid sequences specified above, optionally with (i) an Fc comprising or consisting of the corresponding amino acid sequence recited above; (ii) one or more linker sequence as specified above; and/or (iii) a mutation at N62 as recited above.

[0792] In some aspects, the first polypeptide comprises an amino acid sequence having at least 80%, at least 85%, at least 90%, at least 91%, at least 92%, at least 93%, at least 94%, at least 95%, at least 96%, at least 97%, at least 98%, at least 99%, or 100% identity to SEQ ID NO:451; and the second polypeptide comprises an amino acid sequence having at least 80%, at least 85%, at least 90%, at least 91%, at least 92%, at least 93%, at least 94%, at least 95%, at least 96%, at least 97%, at least 98%, at least 99%, or 100% identity to SEQ ID NO:453. In some aspects, the first polypeptide has at least 90% identity to SEQ ID NO:451 and the second polypeptide has at least 90% identity to SEQ ID NO:453. In some aspects, the first polypeptide comprises the amino acid sequence of SEQ ID NO:451; and the second polypeptide comprises the amino acid sequence of SEQ ID NO:453. In some aspects, the first polypeptide comprises an amino acid sequence encoded by a polynucleotide having at least 80%, at least 85%, at least 90%, at least 91%, at least 92%, at least 93%, at least 94%, at least 95%, at least 96%, at least 97%, at least 98%, at least 99%, or 100% identity to SEQ ID NO:452; and the second polypeptide comprises an amino acid sequence encoded by a polynucleotide having at least 80%, at least 85%, at least 90%, at least 91%, at least 92%, at least 93%, at least 94%, at least 95%, at least 96%, at least 97%, at least 98%, at least 99%, or 100% identity to SEQ ID NO:454. In some aspects, the first polypeptide comprises an amino acid sequence encoded by a polynucleotide having at least 90% identity to SEQ ID NO:452 and the second polypeptide comprises an amino acid sequence encoded by a polynucleotide having at least 90% identity to SEQ ID NO:454. In some aspects, the first polypeptide comprises an amino acid sequence encoded by the polynucleotide of SEQ ID NO:452; and the second polypeptide comprises an amino acid sequence encoded by the polynucleotide of SEQ ID NO:454.

[0793] In some aspects, VH1 and VH3 comprise an amino acid sequence having at least 80%, at least 85%, at least 90%, at least 91%, at least 92%, at least 93%, at least 94%, at least 95%, at least 96%, at least 97%, at least 98%, at least 99%, or 100% identity to SEQ ID NO:58; VH2 comprises an amino acid sequence having at least 80%, at least 85%, at least 90%, at least 91%, at least 92%, at least 93%, at least 94%, at least 95%, at least 96%, at least 97%, at least 98%, at least 99%, or 100% identity to SEQ ID NO:287; VH4 comprises an amino acid sequence having at least 80%, at least 85%, at least 90%, at least 91%, at least 92%, at least 93%, at least 94%, at least 95%, at least 96%, at least 97%, at least 98%, at least 99%, or 100% identity to SEQ ID NO:279; VL1 and VL3 comprise an amino acid sequence having at least 80%, at least 85%, at least 90%, at least 91%, at least 92%, at least 93%, at least 94%, at least 95%, at least 96%, at least 97%, at least 98%, at least 99%, or 100% identity to SEQ ID NO:54; VL2 comprises an amino acid sequence having at least 80%, at least 85%, at least 90%, at least 91%, at least 92%, at least 93%, at least 94%, at least 95%, at least 96%, at least 97%, at least 98%, at least 99%, or 100% identity to SEQ ID NO:283; and VL4 comprises an amino acid sequence having at least 80%, at least 85%, at least 90%, at least 91%, at least 92%, at least 93%, at least 94%, at least 95%, at least 96%, at least 97%, at least 98%, at least 99%, or 100% identity to SEQ ID NO:275. In some aspects, VH1 and VH3 comprise the amino acid sequence of SEQ ID NO:58; VH2 comprises the amino acid sequence of SEQ ID NO:287; VH4 comprises the amino acid sequence of SEQ ID NO:279; VL1 and VL3 comprise the amino acid sequence of SEQ ID NO:54; VL2 comprises the amino acid sequence of SEQ ID NO:283; and VL4 comprises the amino acid sequence of SEQ ID NO:275. In some aspects, L1-L16 comprise the amino acid sequence of any one of SEQ ID NOs:1-34, wherein SEQ ID NO:1 has the amino acid sequence of G, SEQ ID NO:2 has the amino acid sequence of A, SEQ ID NO:3 has the amino acid sequence of GSS and SEQ ID NO:4 has the amino acid sequence of ASG. In some aspects, L1 or L4 and L7 or L10 comprise the amino acid sequence of SEQ ID NO:6; L2 or L5 and L8 or L11 comprise the amino acid sequence of SEQ ID NO:27; and L3 or L6 and L9 or L12 comprise the amino acid sequence of SEQ ID NO:6. In some aspects, L1 or L5 and L9 or L13 comprise the amino acid sequence of SEQ ID NO:6; L2 or L6 and L10 or L14 comprise the amino acid sequence of SEQ ID NO:27; L3 or L7 and L11 or L15 comprise the amino acid sequence of SEQ ID NO:6; and L4 or L8 and L12 or L16 comprise the amino acid sequence of SEQ ID NO:12. In some aspects, Fc comprises a knob-into-hole modification or Fc effector function knockout mutation. In some aspects, Fc comprises an amino acid sequence having at least 80%, at least 85%, at least 90%, at least 91%, at least 92%, at least 93%, at least 94%, at least 95%, at least 96%, at least 97%, at least 98%, at least 99%, or 100% identity to SEQ ID NO:293 or 294. In some aspects, Fc comprises the amino acid sequence of SEQ ID NO:293 or 294. In some aspects, the sequence has a mutation at N62, for example, N62Q or N62Q at, for example, SEQ ID NO:279. In some preferred aspects, VH1, VH2, VH3, VH4, VL1, VL2, VL3 and VL4 have at least 90% identity with the corresponding amino acid sequences specified above, optionally with (i) an Fc having at least 90% identity with the corresponding amino acid sequence recited above; (ii) one or more linker sequence as specified above; and/or (iii) a mutation at N62 as recited above. In some particularly preferred aspects, VH1, VH2, VH3, VH4, VL1, VL2, VL3 and VL4 comprise or consist of the corresponding amino acid sequences specified above, optionally with (i) an Fc comprising or consisting of the corresponding amino acid sequence recited above; (ii) one or more linker sequence as specified above; and/or (iii) a mutation at N62 as recited above.

[0794] In some aspects, the first polypeptide comprises an amino acid sequence having at least 80%, at least 85%, at least 90%, at least 91%, at least 92%, at least 93%, at least 94%, at least 95%, at least 96%, at least 97%, at least 98%, at least 99%, or 100% identity to SEQ ID NO:455; and the second polypeptide comprises an amino acid sequence having at least 80%, at least 85%, at least 90%, at least 91%, at least 92%, at least 93%, at least 94%, at least 95%, at least 96%, at least 97%, at least 98%, at least 99%, or 100% identity to SEQ ID NO:457. In some aspects, the first polypeptide has at least 90% identity to SEQ ID NO:455 and the second polypeptide has at least 90% identity to SEQ ID NO:457. In some aspects, the first polypeptide comprises the amino acid sequence of SEQ ID NO:455; and the second polypeptide comprises the amino acid sequence of SEQ ID NO:457. In some aspects, the first polypeptide comprises an amino acid sequence encoded by a polynucleotide having at least 80%, at least 85%, at least 90%, at least 91%, at least 92%, at least 93%, at least 94%, at least 95%, at least 96%, at least 97%, at least 98%, at least 99%, or 100% identity to SEQ ID NO:456; and the second polypeptide comprises an amino acid sequence encoded by a polynucleotide having at least 80%, at least 85%, at least 90%, at least 91%, at least 92%, at least 93%, at least 94%, at least 95%, at least 96%, at least 97%, at least 98%, at least 99%, or 100% identity to SEQ ID NO:458. In some aspects, the first polypeptide comprises an amino acid sequence encoded by a polynucleotide having at least 90% identity to SEQ ID NO:456 and the second polypeptide comprises an amino acid sequence encoded by a polynucleotide having at least 90% identity to SEQ ID NO:458. In some aspects, the first polypeptide comprises an amino acid sequence encoded by the polynucleotide of SEQ ID NO:456; and the second polypeptide comprises an amino acid sequence encoded by the polynucleotide of SEQ ID NO:458.

[0795] In some aspects, VH1 and VH4 comprise an amino acid sequence having at least 80%, at least 85%, at least 90%, at least 91%, at least 92%, at least 93%, at least 94%, at least 95%, at least 96%, at least 97%, at least 98%, at least 99%, or 100% identity to SEQ ID NO:58; VH2 comprises an amino acid sequence having at least 80%, at least 85%, at least 90%, at least 91%, at least 92%, at least 93%, at least 94%, at least 95%, at least 96%, at least 97%, at least 98%, at least 99%, or 100% identity to SEQ ID NO:287; VH3 comprises an amino acid sequence having at least 80%, at least 85%, at least 90%, at least 91%, at least 92%, at least 93%, at least 94%, at least 95%, at least 96%, at least 97%, at least 98%, at least 99%, or 100% identity to SEQ ID NO:279; VL1 and VL4 comprise an amino acid sequence having at least 80%, at least 85%, at least 90%, at least 91%, at least 92%, at least 93%, at least 94%, at least 95%, at least 96%, at least 97%, at least 98%, at least 99%, or 100% identity to SEQ ID NO:54; VL2 comprises an amino acid sequence having at least 80%, at least 85%, at least 90%, at least 91%, at least 92%, at least 93%, at least 94%, at least 95%, at least 96%, at least 97%, at least 98%, at least 99%, or 100% identity to SEQ ID NO:283; and VL3 comprises an amino acid sequence having at least 80%, at least 85%, at least 90%, at least 91%, at least 92%, at least 93%, at least 94%, at least 95%, at least 96%, at least 97%, at least 98%, at least 99%, or 100% identity to SEQ ID NO:275. In some aspects, VH1 and VH4 comprise the amino acid sequence of SEQ ID NO:58; VH2 comprises the amino acid sequence of SEQ ID NO:287; VH3 comprises the amino acid sequence of SEQ ID NO:279; VL1 and VL4 comprise the amino acid sequence of SEQ ID NO:54; VL2 comprises the amino acid sequence of SEQ ID NO:283; and VL3 comprises the amino acid sequence of SEQ ID NO:275. In some aspects, L1-L16 comprise the amino acid sequence of any one of SEQ ID NOs:1-34, wherein SEQ ID NO:1 has the amino acid sequence of G, SEQ ID NO:2 has the amino acid sequence of A, SEQ ID NO:3 has the amino acid sequence of GSS and SEQ ID NO:4 has the amino acid sequence of ASG. In some aspects, L1 or L4 and L7 or L10 comprise the amino acid sequence of SEQ ID NO:6; L2 or L5 and L8 or L11 comprise the amino acid sequence of SEQ ID NO:27; and L3 or L6 and L9 or L12 comprise the amino acid sequence of SEQ ID NO:6. In some aspects, L1 or L5 and L9 or L13 comprise the amino acid sequence of SEQ ID NO:6; L2 or L6 and L10 or L14 comprise the amino acid sequence of SEQ ID NO:27; L3 or L7 and L11 or L15 comprise the amino acid sequence of SEQ ID NO:6; and L4 or L8 and L12 or L16 comprise the amino acid sequence of SEQ ID NO:12. In some aspects, Fc comprises a knob-into-hole modification or Fc effector function knockout mutation. In some aspects, Fc comprises an amino acid sequence having at least 80%, at least 85%, at least 90%, at least 91%, at least 92%, at least 93%, at least 94%, at least 95%, at least 96%, at least 97%, at least 98%, at least 99%, or 100% identity to SEQ ID NO:293 or 294. In some aspects, Fc comprises the amino acid sequence of SEQ ID NO:293 or 294. In some aspects, the sequence has a mutation at N62, for example, N62Q or N62Q at, for example, SEQ ID NO:279. In some preferred aspects, VH1, VH2, VH3, VH4, VL1, VL2, VL3 and VL4 have at least 90% identity with the corresponding amino acid sequences specified above, optionally with (i) an Fc having at least 90% identity with the corresponding amino acid sequence recited above; (ii) one or more linker sequence as specified above; and/or (iii) a mutation at N62 as recited above. In some particularly preferred aspects, VH1, VH2, VH3, VH4, VL1, VL2, VL3 and VL4 comprise or consist of the corresponding amino acid sequences specified above, optionally with (i) an Fc comprising or consisting of the corresponding amino acid sequence recited above; (ii) one or more linker sequence as specified above; and/or (iii) a mutation at N62 as recited above.

[0796] In some aspects, the first polypeptide comprises an amino acid sequence having at least 80%, at least 85%, at least 90%, at least 91%, at least 92%, at least 93%, at least 94%, at least 95%, at least 96%, at least 97%, at least 98%, at least 99%, or 100% identity to SEQ ID NO:459; and the second polypeptide comprises an amino acid sequence having at least 80%, at least 85%, at least 90%, at least 91%, at least 92%, at least 93%, at least 94%, at least 95%, at least 96%, at least 97%, at least 98%, at least 99%, or 100% identity to SEQ ID NO:461. In some aspects, the first polypeptide has at least 90% identity to SEQ ID NO:459 and the second polypeptide has at least 90% identity to SEQ ID NO:461. In some aspects, the first polypeptide comprises the amino acid sequence of SEQ ID NO:459; and the second polypeptide comprises the amino acid sequence of SEQ ID NO:461. In some aspects, the first polypeptide comprises an amino acid sequence encoded by a polynucleotide having at least 80%, at least 85%, at least 90%, at least 91%, at least 92%, at least 93%, at least 94%, at least 95%, at least 96%, at least 97%, at least 98%, at least 99%, or 100% identity to SEQ ID NO:460; and the second polypeptide comprises an amino acid sequence encoded by a polynucleotide having at least 80%, at least 85%, at least 90%, at least 91%, at least 92%, at least 93%, at least 94%, at least 95%, at least 96%, at least 97%, at least 98%, at least 99%, or 100% identity to SEQ ID NO:462. In some aspects, the first polypeptide comprises an amino acid sequence encoded by a polynucleotide having at least 90% identity to SEQ ID NO:460 and the second polypeptide comprises an amino acid sequence encoded by a polynucleotide having at least 90% identity to SEQ ID NO:462. In some aspects, the first polypeptide comprises an amino acid sequence encoded by the polynucleotide of SEQ ID NO:460; and the second polypeptide comprises an amino acid sequence encoded by the polynucleotide of SEQ ID NO:462.

[0797] In some aspects, VH1 comprises an amino acid sequence having at least 80%, at least 85%, at least 90%, at least 91%, at least 92%, at least 93%, at least 94%, at least 95%, at least 96%, at least 97%, at least 98%, at least 99%, or 100% identity to SEQ ID NO:287; VH2 and VH3 comprise an amino acid sequence having at least 80%, at least 85%, at least 90%, at least 91%, at least 92%, at least 93%, at least 94%, at least 95%, at least 96%, at least 97%, at least 98%, at least 99%, or 100% identity to SEQ ID NO:58; VH4 comprises an amino acid sequence having at least 80%, at least 85%, at least 90%, at least 91%, at least 92%, at least 93%, at least 94%, at least 95%, at least 96%, at least 97%, at least 98%, at least 99%, or 100% identity to SEQ ID NO:279; VL1 comprises an amino acid sequence having at least 80%, at least 85%, at least 90%, at least 91%, at least 92%, at least 93%, at least 94%, at least 95%, at least 96%, at least 97%, at least 98%, at least 99%, or 100% identity to SEQ ID NO:283; VL2 and VL3 comprise an amino acid sequence having at least 80%, at least 85%, at least 90%, at least 91%, at least 92%, at least 93%, at least 94%, at least 95%, at least 96%, at least 97%, at least 98%, at least 99%, or 100% identity to SEQ ID NO:54; and VL4 comprises an amino acid sequence having at least 80%, at least 85%, at least 90%, at least 91%, at least 92%, at least 93%, at least 94%, at least 95%, at least 96%, at least 97%, at least 98%, at least 99%, or 100% identity to SEQ ID NO:275. In some aspects, VH1 comprises the amino acid sequence of SEQ ID NO:287; VH2 and VH3 comprise the amino acid sequence of SEQ ID NO:58; VH4 comprises the amino acid sequence of SEQ ID NO:279; VL1 comprises the amino acid sequence of SEQ ID NO:283; VL2 and VL3 comprise the amino acid sequence of SEQ ID NO:54; and VL4 comprises the amino acid sequence of SEQ ID NO:275. In some aspects, L1-L16 comprise the amino acid sequence of any one of SEQ ID NOs:1-34, wherein SEQ ID NO:1 has the amino acid sequence of G, SEQ ID NO:2 has the amino acid sequence of A, SEQ ID NO:3 has the amino acid sequence of GSS and SEQ ID NO:4 has the amino acid sequence of ASG. In some aspects, L1 or L4 and L7 or L10 comprise the amino acid sequence of SEQ ID NO:6; L2 or L5 and L8 or L11 comprise the amino acid sequence of SEQ ID NO:27; and L3 or L6 and L9 or L12 comprise the amino acid sequence of SEQ ID NO:6. In some aspects, L1 or L5 and L9 or L13 comprise the amino acid sequence of SEQ ID NO:6; L2 or L6 and L10 or L14 comprise the amino acid sequence of SEQ ID NO:27; L3 or L7 and L11 or L15 comprise the amino acid sequence of SEQ ID NO:6; and L4 or L8 and L12 or L16 comprise the amino acid sequence of SEQ ID NO:12. In some aspects, Fc comprises a knob-into-hole modification or Fc effector function knockout mutation. In some aspects, Fc comprises an amino acid sequence having at least 80%, at least 85%, at least 90%, at least 91%, at least 92%, at least 93%, at least 94%, at least 95%, at least 96%, at least 97%, at least 98%, at least 99%, or 100% identity to SEQ ID NO:293 or 294. In some aspects, Fc comprises the amino acid sequence of SEQ ID NO:293 or 294. In some aspects, the sequence has a mutation at N62, for example, N62Q or N62Q at, for example, SEQ ID NO:279. In some preferred aspects, VH1, VH2, VH3, VH4, VL1, VL2, VL3 and VL4 have at least 90% identity with the corresponding amino acid sequences specified above, optionally with (i) an Fc having at least 90% identity with the corresponding amino acid sequence recited above; (ii) one or more linker sequence as specified above; and/or (iii) a mutation at N62 as recited above. In some particularly preferred aspects, VH1, VH2, VH3, VH4, VL1, VL2, VL3 and VL4 comprise or consist of the corresponding amino acid sequences specified above, optionally with (i) an Fc comprising or consisting of the corresponding amino acid sequence recited above; (ii) one or more linker sequence as specified above; and/or (iii) a mutation at N62 as recited above.

[0798] In some aspects, the first polypeptide comprises an amino acid sequence having at least 80%, at least 85%, at least 90%, at least 91%, at least 92%, at least 93%, at least 94%, at least 95%, at least 96%, at least 97%, at least 98%, at least 99%, or 100% identity to SEQ ID NO:463; and the second polypeptide comprises an amino acid sequence having at least 80%, at least 85%, at least 90%, at least 91%, at least 92%, at least 93%, at least 94%, at least 95%, at least 96%, at least 97%, at least 98%, at least 99%, or 100% identity to SEQ ID NO:465. In some aspects, the first polypeptide has at least 90% identity to SEQ ID NO:463 and the second polypeptide has at least 90% identity to SEQ ID NO:465. In some aspects, the first polypeptide comprises the amino acid sequence of SEQ ID NO:463; and the second polypeptide comprises the amino acid sequence of SEQ ID NO:465. In some aspects, the first polypeptide comprises an amino acid sequence encoded by a polynucleotide having at least 80%, at least 85%, at least 90%, at least 91%, at least 92%, at least 93%, at least 94%, at least 95%, at least 96%, at least 97%, at least 98%, at least 99%, or 100% identity to SEQ ID NO:464; and the second polypeptide comprises an amino acid sequence encoded by a polynucleotide having at least 80%, at least 85%, at least 90%, at least 91%, at least 92%, at least 93%, at least 94%, at least 95%, at least 96%, at least 97%, at least 98%, at least 99%, or 100% identity to SEQ ID NO:466. In some aspects, the first polypeptide comprises an amino acid sequence encoded by a polynucleotide having at least 90% identity to SEQ ID NO:464 and the second polypeptide comprises an amino acid sequence encoded by a polynucleotide having at least 90% identity to SEQ ID NO:466. In some aspects, the first polypeptide comprises an amino acid sequence encoded by the polynucleotide of SEQ ID NO:464; and the second polypeptide comprises an amino acid sequence encoded by the polynucleotide of SEQ ID NO:466.

[0799] In some aspects, VH1 comprises an amino acid sequence having at least 80%, at least 85%, at least 90%, at least 91%, at least 92%, at least 93%, at least 94%, at least 95%, at least 96%, at least 97%, at least 98%, at least 99%, or 100% identity to SEQ ID NO:287; VH2 and VH4 comprise an amino acid sequence having at least 80%, at least 85%, at least 90%, at least 91%, at least 92%, at least 93%, at least 94%, at least 95%, at least 96%, at least 97%, at least 98%, at least 99%, or 100% identity to SEQ ID NO:58; VH3 comprises an amino acid sequence having at least 80%, at least 85%, at least 90%, at least 91%, at least 92%, at least 93%, at least 94%, at least 95%, at least 96%, at least 97%, at least 98%, at least 99%, or 100% identity to SEQ ID NO:279; VL1 comprises an amino acid sequence having at least 80%, at least 85%, at least 90%, at least 91%, at least 92%, at least 93%, at least 94%, at least 95%, at least 96%, at least 97%, at least 98%, at least 99%, or 100% identity to SEQ ID NO:283; VL2 and VL4 comprise an amino acid sequence having at least 80%, at least 85%, at least 90%, at least 91%, at least 92%, at least 93%, at least 94%, at least 95%, at least 96%, at least 97%, at least 98%, at least 99%, or 100% identity to SEQ ID NO:54; and VL3 comprises an amino acid sequence having at least 80%, at least 85%, at least 90%, at least 91%, at least 92%, at least 93%, at least 94%, at least 95%, at least 96%, at least 97%, at least 98%, at least 99%, or 100% identity to SEQ ID NO:275. In some aspects, VH1 comprises the amino acid sequence of SEQ ID NO:287; VH2 and VH4 comprise the amino acid sequence of SEQ ID NO:58; VH3 comprises the amino acid sequence of SEQ ID NO:279; VL1 comprises the amino acid sequence of SEQ ID NO:283; VL2 and VL4 comprise the amino acid sequence of SEQ ID NO:54; and VL3 comprises the amino acid sequence of SEQ ID NO:275. In some aspects, L1-L16 comprise the amino acid sequence of any one of SEQ ID NOs:1-34, wherein SEQ ID NO:1 has the amino acid sequence of G, SEQ ID NO:2 has the amino acid sequence of A, SEQ ID NO:3 has the amino acid sequence of GSS and SEQ ID NO:4 has the amino acid sequence of ASG. In some aspects, L1 or L4 and L7 or L10 comprise the amino acid sequence of SEQ ID NO:6; L2 or L5 and L8 or L11 comprise the amino acid sequence of SEQ ID NO:27; and L3 or L6 and L9 or L12 comprise the amino acid sequence of SEQ ID NO:6. In some aspects, L1 or L5 and L9 or L13 comprise the amino acid sequence of SEQ ID NO:6; L2 or L6 and L10 or L14 comprise the amino acid sequence of SEQ ID NO:27; L3 or L7 and L11 or L15 comprise the amino acid sequence of SEQ ID NO:6; and L4 or L8 and L12 or L16 comprise the amino acid sequence of SEQ ID NO:12. In some aspects, Fc comprises a knob-into-hole modification or Fe effector function knockout mutation. In some aspects, Fc comprises an amino acid sequence having at least 80%, at least 85%, at least 90%, at least 91%, at least 92%, at least 93%, at least 94%, at least 95%, at least 96%, at least 97%, at least 98%, at least 99%, or 100% identity to SEQ ID NO:293 or 294. In some aspects, Fc comprises the amino acid sequence of SEQ ID NO:293 or 294. In some aspects, the sequence has a mutation at N62, for example, N62Q or N62Q at, for example, SEQ ID NO:279. In some preferred aspects, VH1, VH2, VH3, VH4, VL1, VL2, VL3 and VL4 have at least 90% identity with the corresponding amino acid sequences specified above, optionally with (i) an Fc having at least 90% identity with the corresponding amino acid sequence recited above; (ii) one or more linker sequence as specified above; and/or (iii) a mutation at N62 as recited above. In some particularly preferred aspects, VH1, VH2, VH3, VH4, VL1, VL2, VL3 and VL4 comprise or consist of the corresponding amino acid sequences specified above, optionally with (i) an Fc comprising or consisting of the corresponding amino acid sequence recited above; (ii) one or more linker sequence as specified above; and/or (iii) a mutation at N62 as recited above.

[0800] In some aspects, the first polypeptide comprises an amino acid sequence having at least 80%, at least 85%, at least 90%, at least 91%, at least 92%, at least 93%, at least 94%, at least 95%, at least 96%, at least 97%, at least 98%, at least 99%, or 100% identity to SEQ ID NO:467; and the second polypeptide comprises an amino acid sequence having at least 80%, at least 85%, at least 90%, at least 91%, at least 92%, at least 93%, at least 94%, at least 95%, at least 96%, at least 97%, at least 98%, at least 99%, or 100% identity to SEQ ID NO:469. In some aspects, the first polypeptide has at least 90% identity to SEQ ID NO:467 and the second polypeptide has at least 90% identity to SEQ ID NO:469. In some aspects, the first polypeptide comprises the amino acid sequence of SEQ ID NO:467; and the second polypeptide comprises the amino acid sequence of SEQ ID NO:469. In some aspects, the first polypeptide comprises an amino acid sequence encoded by a polynucleotide having at least 80%, at least 85%, at least 90%, at least 91%, at least 92%, at least 93%, at least 94%, at least 95%, at least 96%, at least 97%, at least 98%, at least 99%, or 100% identity to SEQ ID NO:468; and the second polypeptide comprises an amino acid sequence encoded by a polynucleotide having at least 80%, at least 85%, at least 90%, at least 91%, at least 92%, at least 93%, at least 94%, at least 95%, at least 96%, at least 97%, at least 98%, at least 99%, or 100% identity to SEQ ID NO:470. In some aspects, the first polypeptide comprises an amino acid sequence encoded by a polynucleotide having at least 90% identity to SEQ ID NO:468 and the second polypeptide comprises an amino acid sequence encoded by a polynucleotide having at least 90% identity to SEQ ID NO:470. In some aspects, the first polypeptide comprises an amino acid sequence encoded by the polynucleotide of SEQ ID NO:468; and the second polypeptide comprises an amino acid sequence encoded by the polynucleotide of SEQ ID NO:470.

[0801] In some aspects, VH1 comprises an amino acid sequence having at least 80%, at least 85%, at least 90%, at least 91%, at least 92%, at least 93%, at least 94%, at least 95%, at least 96%, at least 97%, at least 98%, at least 99%, or 100% identity to SEQ ID NO:287; VH2 and VH3 comprise an amino acid sequence having at least 80%, at least 85%, at least 90%, at least 91%, at least 92%, at least 93%, at least 94%, at least 95%, at least 96%, at least 97%, at least 98%, at least 99%, or 100% identity to SEQ ID NO:279; VH4 comprises an amino acid sequence having at least 80%, at least 85%, at least 90%, at least 91%, at least 92%, at least 93%, at least 94%, at least 95%, at least 96%, at least 97%, at least 98%, at least 99%, or 100% identity to SEQ ID NO:58; VL1 comprises an amino acid sequence having at least 80%, at least 85%, at least 90%, at least 91%, at least 92%, at least 93%, at least 94%, at least 95%, at least 96%, at least 97%, at least 98%, at least 99%, or 100% identity to SEQ ID NO:283; VL2 and VL3 comprise an amino acid sequence having at least 80%, at least 85%, at least 90%, at least 91%, at least 92%, at least 93%, at least 94%, at least 95%, at least 96%, at least 97%, at least 98%, at least 99%, or 100% identity to SEQ ID NO:275; and VL4 comprises an amino acid sequence having at least 80%, at least 85%, at least 90%, at least 91%, at least 92%, at least 93%, at least 94%, at least 95%, at least 96%, at least 97%, at least 98%, at least 99%, or 100% identity to SEQ ID NO:54. In some aspects, VH1 comprises the amino acid sequence of SEQ ID NO:287; VH2 and VH3 comprise the amino acid sequence of SEQ ID NO:279; VH4 comprises the amino acid sequence of SEQ ID NO:58; VL1 comprises the amino acid sequence of SEQ ID NO:283; VL2 and VL3 comprise the amino acid sequence of SEQ ID NO:275; and VL4 comprises the amino acid sequence of SEQ ID NO:54. In some aspects, L1-L16 comprise the amino acid sequence of any one of SEQ ID NOs:1-34, wherein SEQ ID NO:1 has the amino acid sequence of G, SEQ ID NO:2 has the amino acid sequence of A, SEQ ID NO:3 has the amino acid sequence of GSS and SEQ ID NO:4 has the amino acid sequence of ASG. In some aspects, L1 or L4 and L7 or L10 comprise the amino acid sequence of SEQ ID NO:6; L2 or L5 and L8 or L11 comprise the amino acid sequence of SEQ ID NO:27; and L3 or L6 and L9 or L12 comprise the amino acid sequence of SEQ ID NO:6. In some aspects, L1 or L5 and L9 or L13 comprise the amino acid sequence of SEQ ID NO:6; L2 or L6 and L10 or L14 comprise the amino acid sequence of SEQ ID NO:27; L3 or L7 and L11 or L15 comprise the amino acid sequence of SEQ ID NO:6; and L4 or L8 and L12 or L16 comprise the amino acid sequence of SEQ ID NO:12. In some aspects, Fc comprises a knob-into-hole modification or Fc effector function knockout mutation. In some aspects, Fc comprises an amino acid sequence having at least 80%, at least 85%, at least 90%, at least 91%, at least 92%, at least 93%, at least 94%, at least 95%, at least 96%, at least 97%, at least 98%, at least 99%, or 100% identity to SEQ ID NO:293 or 294. In some aspects, Fc comprises the amino acid sequence of SEQ ID NO:293 or 294. In some aspects, the sequence has a mutation at N62, for example, N62Q or N62Q at, for example, SEQ ID NO:279. In some preferred aspects, VH1, VH2, VH3, VH4, VL1, VL2, VL3 and VL4 have at least 90% identity with the corresponding amino acid sequences specified above, optionally with (i) an Fc having at least 90% identity with the corresponding amino acid sequence recited above; (ii) one or more linker sequence as specified above; and/or (iii) a mutation at N62 as recited above. In some particularly preferred aspects, VH1, VH2, VH3, VH4, VL1, VL2, VL3 and VL4 comprise or consist of the corresponding amino acid sequences specified above, optionally with (i) an Fc comprising or consisting of the corresponding amino acid sequence recited above; (ii) one or more linker sequence as specified above; and/or (iii) a mutation at N62 as recited above.

[0802] In some aspects, the first polypeptide comprises an amino acid sequence having at least 80%, at least 85%, at least 90%, at least 91%, at least 92%, at least 93%, at least 94%, at least 95%, at least 96%, at least 97%, at least 98%, at least 99%, or 100% identity to SEQ ID NO:471; and the second polypeptide comprises an amino acid sequence having at least 80%, at least 85%, at least 90%, at least 91%, at least 92%, at least 93%, at least 94%, at least 95%, at least 96%, at least 97%, at least 98%, at least 99%, or 100% identity to SEQ ID NO:473. In some aspects, the first polypeptide has at least 90% identity to SEQ ID NO:471 and the second polypeptide has at least 90% identity to SEQ ID NO:473. In some aspects, the first polypeptide comprises the amino acid sequence of SEQ ID NO:471; and the second polypeptide comprises the amino acid sequence of SEQ ID NO:473. In some aspects, the first polypeptide comprises an amino acid sequence encoded by a polynucleotide having at least 80%, at least 85%, at least 90%, at least 91%, at least 92%, at least 93%, at least 94%, at least 95%, at least 96%, at least 97%, at least 98%, at least 99%, or 100% identity to SEQ ID NO:472; and the second polypeptide comprises an amino acid sequence encoded by a polynucleotide having at least 80%, at least 85%, at least 90%, at least 91%, at least 92%, at least 93%, at least 94%, at least 95%, at least 96%, at least 97%, at least 98%, at least 99%, or 100% identity to SEQ ID NO:474. In some aspects, the first polypeptide comprises an amino acid sequence encoded by a polynucleotide having at least 90% identity to SEQ ID NO:472 and the second polypeptide comprises an amino acid sequence encoded by a polynucleotide having at least 90% identity to SEQ ID NO:474. In some aspects, the first polypeptide comprises an amino acid sequence encoded by the polynucleotide of SEQ ID NO:472; and the second polypeptide comprises an amino acid sequence encoded by the polynucleotide of SEQ ID NO:474.

[0803] In some aspects, VH2 comprises an amino acid sequence having at least 80%, at least 85%, at least 90%, at least 91%, at least 92%, at least 93%, at least 94%, at least 95%, at least 96%, at least 97%, at least 98%, at least 99%, or 100% identity to SEQ ID NO:287; VH1 and VH3 comprise an amino acid sequence having at least 80%, at least 85%, at least 90%, at least 91%, at least 92%, at least 93%, at least 94%, at least 95%, at least 96%, at least 97%, at least 98%, at least 99%, or 100% identity to SEQ ID NO:279; VH4 comprises an amino acid sequence having at least 80%, at least 85%, at least 90%, at least 91%, at least 92%, at least 93%, at least 94%, at least 95%, at least 96%, at least 97%, at least 98%, at least 99%, or 100% identity to SEQ ID NO:58; VL2 comprises an amino acid sequence having at least 80%, at least 85%, at least 90%, at least 91%, at least 92%, at least 93%, at least 94%, at least 95%, at least 96%, at least 97%, at least 98%, at least 99%, or 100% identity to SEQ ID NO:283; VL1 and VL3 comprise an amino acid sequence having at least 80%, at least 85%, at least 90%, at least 91%, at least 92%, at least 93%, at least 94%, at least 95%, at least 96%, at least 97%, at least 98%, at least 99%, or 100% identity to SEQ ID NO:275; and VL4 comprises an amino acid sequence having at least 80%, at least 85%, at least 90%, at least 91%, at least 92%, at least 93%, at least 94%, at least 95%, at least 96%, at least 97%, at least 98%, at least 99%, or 100% identity to SEQ ID NO:54. In some aspects, VH2 comprises the amino acid sequence of SEQ ID NO:287; VH1 and VH3 comprise the amino acid sequence of SEQ ID NO:279; VH4 comprises the amino acid sequence of SEQ ID NO:58; VL2 comprises the amino acid sequence of SEQ ID NO:283; VL1 and VL3 comprise the amino acid sequence of SEQ ID NO:275; and VL4 comprises the amino acid sequence of SEQ ID NO:54. In some aspects, L1-L16 comprise the amino acid sequence of any one of SEQ ID NOs:1-34, wherein SEQ ID NO:1 has the amino acid sequence of G, SEQ ID NO:2 has the amino acid sequence of A, SEQ ID NO:3 has the amino acid sequence of GSS and SEQ ID NO:4 has the amino acid sequence of ASG. In some aspects, L1 or L4 and L7 or L10 comprise the amino acid sequence of SEQ ID NO:6; L2 or L5 and L8 or L11 comprise the amino acid sequence of SEQ ID NO:27; and L3 or L6 and L9 or L12 comprise the amino acid sequence of SEQ ID NO:6. In some aspects, L1 or L5 and L9 or L13 comprise the amino acid sequence of SEQ ID NO:6; L2 or L6 and L10 or L14 comprise the amino acid sequence of SEQ ID NO:27; L3 or L7 and L11 or L15 comprise the amino acid sequence of SEQ ID NO:6; and L4 or L8 and L12 or L16 comprise the amino acid sequence of SEQ ID NO:12. In some aspects, Fc comprises a knob-into-hole modification or Fc effector function knockout mutation. In some aspects, Fc comprises an amino acid sequence having at least 80%, at least 85%, at least 90%, at least 91%, at least 92%, at least 93%, at least 94%, at least 95%, at least 96%, at least 97%, at least 98%, at least 99%, or 100% identity to SEQ ID NO:293 or 294. In some aspects, Fc comprises the amino acid sequence of SEQ ID NO:293 or 294. In some aspects, the sequence has a mutation at N62, for example, N62Q or N62Q at, for example, SEQ ID NO:279. In some preferred aspects, VH1, VH2, VH3, VH4, VL1, VL2, VL3 and VL4 have at least 90% identity with the corresponding amino acid sequences specified above, optionally with (i) an Fc having at least 90% identity with the corresponding amino acid sequence recited above; (ii) one or more linker sequence as specified above; and/or (iii) a mutation at N62 as recited above. In some particularly preferred aspects, VH1, VH2, VH3, VH4, VL1, VL2, VL3 and VL4 comprise or consist of the corresponding amino acid sequences specified above, optionally with (i) an Fc comprising or consisting of the corresponding amino acid sequence recited above; (ii) one or more linker sequence as specified above; and/or (iii) a mutation at N62 as recited above.

[0804] In some aspects, the first polypeptide comprises an amino acid sequence having at least 80%, at least 85%, at least 90%, at least 91%, at least 92%, at least 93%, at least 94%, at least 95%, at least 96%, at least 97%, at least 98%, at least 99%, or 100% identity to SEQ ID NO:475; and the second polypeptide comprises an amino acid sequence having at least 80%, at least 85%, at least 90%, at least 91%, at least 92%, at least 93%, at least 94%, at least 95%, at least 96%, at least 97%, at least 98%, at least 99%, or 100% identity to SEQ ID NO:477. In some aspects, the first polypeptide has at least 90% identity to SEQ ID NO:475 and the second polypeptide has at least 90% identity to SEQ ID NO:477. In some aspects, the first polypeptide comprises the amino acid sequence of SEQ ID NO:475; and the second polypeptide comprises the amino acid sequence of SEQ ID NO:477. In some aspects, the first polypeptide comprises an amino acid sequence encoded by a polynucleotide having at least 80%, at least 85%, at least 90%, at least 91%, at least 92%, at least 93%, at least 94%, at least 95%, at least 96%, at least 97%, at least 98%, at least 99%, or 100% identity to SEQ ID NO:476; and the second polypeptide comprises an amino acid sequence encoded by a polynucleotide having at least 80%, at least 85%, at least 90%, at least 91%, at least 92%, at least 93%, at least 94%, at least 95%, at least 96%, at least 97%, at least 98%, at least 99%, or 100% identity to SEQ ID NO:478. In some aspects, the first polypeptide comprises an amino acid sequence encoded by a polynucleotide having at least 90% identity to SEQ ID NO:476 and the second polypeptide comprises an amino acid sequence encoded by a polynucleotide having at least 90% identity to SEQ ID NO:478. In some aspects, the first polypeptide comprises an amino acid sequence encoded by the polynucleotide of SEQ ID NO:476; and the second polypeptide comprises an amino acid sequence encoded by the polynucleotide of SEQ ID NO:478.

[0805] In some aspects, VH1 comprises an amino acid sequence having at least 80%, at least 85%, at least 90%, at least 91%, at least 92%, at least 93%, at least 94%, at least 95%, at least 96%, at least 97%, at least 98%, at least 99%, or 100% identity to SEQ ID NO:58; VH2 and VH4 comprise an amino acid sequence having at least 80%, at least 85%, at least 90%, at least 91%, at least 92%, at least 93%, at least 94%, at least 95%, at least 96%, at least 97%, at least 98%, at least 99%, or 100% identity to SEQ ID NO:279; VH3 comprises an amino acid sequence having at least 80%, at least 85%, at least 90%, at least 91%, at least 92%, at least 93%, at least 94%, at least 95%, at least 96%, at least 97%, at least 98%, at least 99%, or 100% identity to SEQ ID NO:287; VL1 comprises an amino acid sequence having at least 80%, at least 85%, at least 90%, at least 91%, at least 92%, at least 93%, at least 94%, at least 95%, at least 96%, at least 97%, at least 98%, at least 99%, or 100% identity to SEQ ID NO:54; VL2 and VL4 comprise an amino acid sequence having at least 80%, at least 85%, at least 90%, at least 91%, at least 92%, at least 93%, at least 94%, at least 95%, at least 96%, at least 97%, at least 98%, at least 99%, or 100% identity to SEQ ID NO:275; and VL3 comprises an amino acid sequence having at least 80%, at least 85%, at least 90%, at least 91%, at least 92%, at least 93%, at least 94%, at least 95%, at least 96%, at least 97%, at least 98%, at least 99%, or 100% identity to SEQ ID NO:283. In some aspects, VH1 comprises the amino acid sequence of SEQ ID NO:58; VH2 and VH4 comprise the amino acid sequence of SEQ ID NO:279; VH3 comprises the amino acid sequence of SEQ ID NO:287; VL1 comprises the amino acid sequence of SEQ ID NO:54; VL2 and VL4 comprise the amino acid sequence of SEQ ID NO:275; and VL3 comprises the amino acid sequence of SEQ ID NO:283. In some aspects, L1-L16 comprise the amino acid sequence of any one of SEQ ID NOs:1-34, wherein SEQ ID NO:1 has the amino acid sequence of G, SEQ ID NO:2 has the amino acid sequence of A, SEQ ID NO:3 has the amino acid sequence of GSS and SEQ ID NO:4 has the amino acid sequence of ASG. In some aspects, L1 or L4 and L7 or L10 comprise the amino acid sequence of SEQ ID NO:6; L2 or L5 and L8 or L11 comprise the amino acid sequence of SEQ ID NO:27; and L3 or L6 and L9 or L12 comprise the amino acid sequence of SEQ ID NO:6. In some aspects, L1 or L5 and L9 or L13 comprise the amino acid sequence of SEQ ID NO:6; L2 or L6 and L10 or L14 comprise the amino acid sequence of SEQ ID NO:27; L3 or L7 and L11 or L15 comprise the amino acid sequence of SEQ ID NO:6; and L4 or L8 and L12 or L16 comprise the amino acid sequence of SEQ ID NO:12. In some aspects, Fc comprises a knob-into-hole modification or Fc effector function knockout mutation. In some aspects, Fc comprises an amino acid sequence having at least 80%, at least 85%, at least 90%, at least 91%, at least 92%, at least 93%, at least 94%, at least 95%, at least 96%, at least 97%, at least 98%, at least 99%, or 100% identity to SEQ ID NO:293 or 294. In some aspects, Fc comprises the amino acid sequence of SEQ ID NO:293 or 294. In some aspects, the sequence has a mutation at N62, for example, N62Q or N62Q at, for example, SEQ ID NO:279. In some preferred aspects, VH1, VH2, VH3, VH4, VL1, VL2, VL3 and VL4 have at least 90% identity with the corresponding amino acid sequences specified above, optionally with (i) an Fc having at least 90% identity with the corresponding amino acid sequence recited above; (ii) one or more linker sequence as specified above; and/or (iii) a mutation at N62 as recited above. In some particularly preferred aspects, VH1, VH2, VH3, VH4, VL1, VL2, VL3 and VL4 comprise or consist of the corresponding amino acid sequences specified above, optionally with (i) an Fc comprising or consisting of the corresponding amino acid sequence recited above; (ii) one or more linker sequence as specified above; and/or (iii) a mutation at N62 as recited above.

[0806] In some aspects, the first polypeptide comprises an amino acid sequence having at least 80%, at least 85%, at least 90%, at least 91%, at least 92%, at least 93%, at least 94%, at least 95%, at least 96%, at least 97%, at least 98%, at least 99%, or 100% identity to SEQ ID NO:479; and the second polypeptide comprises an amino acid sequence having at least 80%, at least 85%, at least 90%, at least 91%, at least 92%, at least 93%, at least 94%, at least 95%, at least 96%, at least 97%, at least 98%, at least 99%, or 100% identity to SEQ ID NO:481. In some aspects, the first polypeptide has at least 90% identity to SEQ ID NO:479 and the second polypeptide has at least 90% identity to SEQ ID NO:481. In some aspects, the first polypeptide comprises the amino acid sequence of SEQ ID NO:479; and the second polypeptide comprises the amino acid sequence of SEQ ID NO:481. In some aspects, the first polypeptide comprises an amino acid sequence encoded by a polynucleotide having at least 80%, at least 85%, at least 90%, at least 91%, at least 92%, at least 93%, at least 94%, at least 95%, at least 96%, at least 97%, at least 98%, at least 99%, or 100% identity to SEQ ID NO:480; and the second polypeptide comprises an amino acid sequence encoded by a polynucleotide having at least 80%, at least 85%, at least 90%, at least 91%, at least 92%, at least 93%, at least 94%, at least 95%, at least 96%, at least 97%, at least 98%, at least 99%, or 100% identity to SEQ ID NO:482. In some aspects, the first polypeptide comprises an amino acid sequence encoded by a polynucleotide having at least 90% identity to SEQ ID NO:480 and the second polypeptide comprises an amino acid sequence encoded by a polynucleotide having at least 90% identity to SEQ ID NO:482. In some aspects, the first polypeptide comprises an amino acid sequence encoded by the polynucleotide of SEQ ID NO:480; and the second polypeptide comprises an amino acid sequence encoded by the polynucleotide of SEQ ID NO:482.

[0807] In some aspects, VH1 comprises an amino acid sequence having at least 80%, at least 85%, at least 90%, at least 91%, at least 92%, at least 93%, at least 94%, at least 95%, at least 96%, at least 97%, at least 98%, at least 99%, or 100% identity to SEQ ID NO:58; VH2 and VH3 comprise an amino acid sequence having at least 80%, at least 85%, at least 90%, at least 91%, at least 92%, at least 93%, at least 94%, at least 95%, at least 96%, at least 97%, at least 98%, at least 99%, or 100% identity to SEQ ID NO:279; VH4 comprises an amino acid sequence having at least 80%, at least 85%, at least 90%, at least 91%, at least 92%, at least 93%, at least 94%, at least 95%, at least 96%, at least 97%, at least 98%, at least 99%, or 100% identity to SEQ ID NO:287; VL1 comprises an amino acid sequence having at least 80%, at least 85%, at least 90%, at least 91%, at least 92%, at least 93%, at least 94%, at least 95%, at least 96%, at least 97%, at least 98%, at least 99%, or 100% identity to SEQ ID NO:54; VL2 and VL3 comprise an amino acid sequence having at least 80%, at least 85%, at least 90%, at least 91%, at least 92%, at least 93%, at least 94%, at least 95%, at least 96%, at least 97%, at least 98%, at least 99%, or 100% identity to SEQ ID NO:275; and VL4 comprises an amino acid sequence having at least 80%, at least 85%, at least 90%, at least 91%, at least 92%, at least 93%, at least 94%, at least 95%, at least 96%, at least 97%, at least 98%, at least 99%, or 100% identity to SEQ ID NO:283. In some aspects, VH1 comprises the amino acid sequence of SEQ ID NO:58; VH2 and VH3 comprise the amino acid sequence of SEQ ID NO:279; VH4 comprises the amino acid sequence of SEQ ID NO:287; VL1 comprises the amino acid sequence of SEQ ID NO:54; VL2 and VL3 comprise the amino acid sequence of SEQ ID NO:275; and VL4 comprises the amino acid sequence of SEQ ID NO:283. In some aspects, L1-L16 comprise the amino acid sequence of any one of SEQ ID NOs:1-34, wherein SEQ ID NO:1 has the amino acid sequence of G, SEQ ID NO:2 has the amino acid sequence of A, SEQ ID NO:3 has the amino acid sequence of GSS and SEQ ID NO:4 has the amino acid sequence of ASG. In some aspects, L1 or L4 and L7 or L10 comprise the amino acid sequence of SEQ ID NO:6; L2 or L5 and L8 or L11 comprise the amino acid sequence of SEQ ID NO:27; and L3 or L6 and L9 or L12 comprise the amino acid sequence of SEQ ID NO:6. In some aspects, L1 or L5 and L9 or L13 comprise the amino acid sequence of SEQ ID NO:6; L2 or L6 and L10 or L14 comprise the amino acid sequence of SEQ ID NO:27; L3 or L7 and L11 or L15 comprise the amino acid sequence of SEQ ID NO:6; and L4 or L8 and L12 or L16 comprise the amino acid sequence of SEQ ID NO:12. In some aspects, Fc comprises a knob-into-hole modification or Fc effector function knockout mutation. In some aspects, Fc comprises an amino acid sequence having at least 80%, at least 85%, at least 90%, at least 91%, at least 92%, at least 93%, at least 94%, at least 95%, at least 96%, at least 97%, at least 98%, at least 99%, or 100% identity to SEQ ID NO:293 or 294. In some aspects, Fc comprises the amino acid sequence of SEQ ID NO:293 or 294. In some aspects, the sequence has a mutation at N62, for example, N62Q or N62Q at, for example, SEQ ID NO:279. In some preferred aspects, VH1, VH2, VH3, VH4, VL1, VL2, VL3 and VL4 have at least 90% identity with the corresponding amino acid sequences specified above, optionally with (i) an Fc having at least 90% identity with the corresponding amino acid sequence recited above; (ii) one or more linker sequence as specified above; and/or (iii) a mutation at N62 as recited above. In some particularly preferred aspects, VH1, VH2, VH3, VH4, VL1, VL2, VL3 and VL4 comprise or consist of the corresponding amino acid sequences specified above, optionally with (i) an Fc comprising or consisting of the corresponding amino acid sequence recited above; (ii) one or more linker sequence as specified above; and/or (iii) a mutation at N62 as recited above.

[0808] In some aspects, the first polypeptide comprises an amino acid sequence having at least 80%, at least 85%, at least 90%, at least 91%, at least 92%, at least 93%, at least 94%, at least 95%, at least 96%, at least 97%, at least 98%, at least 99%, or 100% identity to SEQ ID NO:483; and the second polypeptide comprises an amino acid sequence having at least 80%, at least 85%, at least 90%, at least 91%, at least 92%, at least 93%, at least 94%, at least 95%, at least 96%, at least 97%, at least 98%, at least 99%, or 100% identity to SEQ ID NO:485. In some aspects, the first polypeptide has at least 90% identity to SEQ ID NO:483 and the second polypeptide has at least 90% identity to SEQ ID NO:485. In some aspects, the first polypeptide comprises the amino acid sequence of SEQ ID NO:483; and the second polypeptide comprises the amino acid sequence of SEQ ID NO:485. In some aspects, the first polypeptide comprises an amino acid sequence encoded by a polynucleotide having at least 80%, at least 85%, at least 90%, at least 91%, at least 92%, at least 93%, at least 94%, at least 95%, at least 96%, at least 97%, at least 98%, at least 99%, or 100% identity to SEQ ID NO:484; and the second polypeptide comprises an amino acid sequence encoded by a polynucleotide having at least 80%, at least 85%, at least 90%, at least 91%, at least 92%, at least 93%, at least 94%, at least 95%, at least 96%, at least 97%, at least 98%, at least 99%, or 100% identity to SEQ ID NO:486. In some aspects, the first polypeptide comprises an amino acid sequence encoded by a polynucleotide having at least 90% identity to SEQ ID NO:484 and the second polypeptide comprises an amino acid sequence encoded by a polynucleotide having at least 90% identity to SEQ ID NO:486. In some aspects, the first polypeptide comprises an amino acid sequence encoded by the polynucleotide of SEQ ID NO:484; and the second polypeptide comprises an amino acid sequence encoded by the polynucleotide of SEQ ID NO:486.

[0809] In some aspects, VH1 comprises an amino acid sequence having at least 80%, at least 85%, at least 90%, at least 91%, at least 92%, at least 93%, at least 94%, at least 95%, at least 96%, at least 97%, at least 98%, at least 99%, or 100% identity to SEQ ID NO:58; VH2 comprises an amino acid sequence having at least 80%, at least 85%, at least 90%, at least 91%, at least 92%, at least 93%, at least 94%, at least 95%, at least 96%, at least 97%, at least 98%, at least 99%, or 100% identity to SEQ ID NO:271; VH3 comprises an amino acid sequence having at least 80%, at least 85%, at least 90%, at least 91%, at least 92%, at least 93%, at least 94%, at least 95%, at least 96%, at least 97%, at least 98%, at least 99%, or 100% identity to SEQ ID NO:263; VH4 comprises an amino acid sequence having at least 80%, at least 85%, at least 90%, at least 91%, at least 92%, at least 93%, at least 94%, at least 95%, at least 96%, at least 97%, at least 98%, at least 99%, or 100% identity to SEQ ID NO:279; VL1 comprises an amino acid sequence having at least 80%, at least 85%, at least 90%, at least 91%, at least 92%, at least 93%, at least 94%, at least 95%, at least 96%, at least 97%, at least 98%, at least 99%, or 100% identity to SEQ ID NO:54; VL2 comprises an amino acid sequence having at least 80%, at least 85%, at least 90%, at least 91%, at least 92%, at least 93%, at least 94%, at least 95%, at least 96%, at least 97%, at least 98%, at least 99%, or 100% identity to SEQ ID NO:267; VL3 comprises an amino acid sequence having at least 80%, at least 85%, at least 90%, at least 91%, at least 92%, at least 93%, at least 94%, at least 95%, at least 96%, at least 97%, at least 98%, at least 99%, or 100% identity to SEQ ID NO:259; and VL4 comprises an amino acid sequence having at least 80%, at least 85%, at least 90%, at least 91%, at least 92%, at least 93%, at least 94%, at least 95%, at least 96%, at least 97%, at least 98%, at least 99%, or 100% identity to SEQ ID NO:275. In some aspects, VH1 comprises the amino acid sequence of SEQ ID NO:58; VH2 comprises the amino acid sequence of SEQ ID NO:271; VH3 comprises the amino acid sequence of SEQ ID NO:263; VH4 comprises the amino acid sequence of SEQ ID NO:279; VL1 comprises the amino acid sequence of SEQ ID NO:54; VL2 comprises the amino acid sequence of SEQ ID NO:267; VL3 comprises the amino acid sequence of SEQ ID NO:259; and VL4 comprises the amino acid sequence of SEQ ID NO:275. In some aspects, L1-L16 comprise the amino acid sequence of any one of SEQ ID NOs:1-34, wherein SEQ ID NO:1 has the amino acid sequence of G, SEQ ID NO:2 has the amino acid sequence of A, SEQ ID NO:3 has the amino acid sequence of GSS and SEQ ID NO:4 has the amino acid sequence of ASG. In some aspects, L1 or L4 and L7 or L10 comprise the amino acid sequence of SEQ ID NO:6; L2 or L5 and L8 or L11 comprise the amino acid sequence of SEQ ID NO:27; and L3 or L6 and L9 or L12 comprise the amino acid sequence of SEQ ID NO:6. In some aspects, L1 or L5 and L9 or L13 comprise the amino acid sequence of SEQ ID NO:6; L2 or L6 and L10 or L14 comprise the amino acid sequence of SEQ ID NO:27; L3 or L7 and L11 or L15 comprise the amino acid sequence of SEQ ID NO:6; and L4 or L8 and L12 or L16 comprise the amino acid sequence of SEQ ID NO:12. In some aspects, Fc comprises a knob-into-hole modification or Fc effector function knockout mutation. In some aspects, Fc comprises an amino acid sequence having at least 80%, at least 85%, at least 90%, at least 91%, at least 92%, at least 93%, at least 94%, at least 95%, at least 96%, at least 97%, at least 98%, at least 99%, or 100% identity to SEQ ID NO:293 or 294. In some aspects, Fc comprises the amino acid sequence of SEQ ID NO:293 or 294. In some aspects, the sequence has a mutation at N62, for example, N62Q or N62Q at, for example, SEQ ID NO:279. In some preferred aspects, VH1, VH2, VH3, VH4, VL1, VL2, VL3 and VL4 have at least 90% identity with the corresponding amino acid sequences specified above, optionally with (i) an Fc having at least 90% identity with the corresponding amino acid sequence recited above; (ii) one or more linker sequence as specified above; and/or (iii) a mutation at N62 as recited above. In some particularly preferred aspects, VH1, VH2, VH3, VH4, VL1, VL2, VL3 and VL4 comprise or consist of the corresponding amino acid sequences specified above, optionally with (i) an Fc comprising or consisting of the corresponding amino acid sequence recited above; (ii) one or more linker sequence as specified above; and/or (iii) a mutation at N62 as recited above.

[0810] In some aspects, the first polypeptide comprises an amino acid sequence having at least 80%, at least 85%, at least 90%, at least 91%, at least 92%, at least 93%, at least 94%, at least 95%, at least 96%, at least 97%, at least 98%, at least 99%, or 100% identity to SEQ ID NO:487; and the second polypeptide comprises an amino acid sequence having at least 80%, at least 85%, at least 90%, at least 91%, at least 92%, at least 93%, at least 94%, at least 95%, at least 96%, at least 97%, at least 98%, at least 99%, or 100% identity to SEQ ID NO:489. In some aspects, the first polypeptide has at least 90% identity to SEQ ID NO:487 and the second polypeptide has at least 90% identity to SEQ ID NO:489. In some aspects, the first polypeptide comprises the amino acid sequence of SEQ ID NO:487; and the second polypeptide comprises the amino acid sequence of SEQ ID NO:489. In some aspects, the first polypeptide comprises an amino acid sequence encoded by a polynucleotide having at least 80%, at least 85%, at least 90%, at least 91%, at least 92%, at least 93%, at least 94%, at least 95%, at least 96%, at least 97%, at least 98%, at least 99%, or 100% identity to SEQ ID NO:488; and the second polypeptide comprises an amino acid sequence encoded by a polynucleotide having at least 80%, at least 85%, at least 90%, at least 91%, at least 92%, at least 93%, at least 94%, at least 95%, at least 96%, at least 97%, at least 98%, at least 99%, or 100% identity to SEQ ID NO:490. In some aspects, the first polypeptide comprises an amino acid sequence encoded by a polynucleotide having at least 90% identity to SEQ ID NO:488 and the second polypeptide comprises an amino acid sequence encoded by a polynucleotide having at least 90% identity to SEQ ID NO:490. In some aspects, the first polypeptide comprises an amino acid sequence encoded by the polynucleotide of SEQ ID NO:488; and the second polypeptide comprises an amino acid sequence encoded by the polynucleotide of SEQ ID NO:490.

[0811] In some aspects, VH1 comprises an amino acid sequence having at least 80%, at least 85%, at least 90%, at least 91%, at least 92%, at least 93%, at least 94%, at least 95%, at least 96%, at least 97%, at least 98%, at least 99%, or 100% identity to SEQ ID NO:58; VH2 comprises an amino acid sequence having at least 80%, at least 85%, at least 90%, at least 91%, at least 92%, at least 93%, at least 94%, at least 95%, at least 96%, at least 97%, at least 98%, at least 99%, or 100% identity to SEQ ID NO:287; VH3 comprises an amino acid sequence having at least 80%, at least 85%, at least 90%, at least 91%, at least 92%, at least 93%, at least 94%, at least 95%, at least 96%, at least 97%, at least 98%, at least 99%, or 100% identity to SEQ ID NO:279; VH4 comprises an amino acid sequence having at least 80%, at least 85%, at least 90%, at least 91%, at least 92%, at least 93%, at least 94%, at least 95%, at least 96%, at least 97%, at least 98%, at least 99%, or 100% identity to SEQ ID NO:263; VL1 comprises an amino acid sequence having at least 80%, at least 85%, at least 90%, at least 91%, at least 92%, at least 93%, at least 94%, at least 95%, at least 96%, at least 97%, at least 98%, at least 99%, or 100% identity to SEQ ID NO:54; VL2 comprises an amino acid sequence having at least 80%, at least 85%, at least 90%, at least 91%, at least 92%, at least 93%, at least 94%, at least 95%, at least 96%, at least 97%, at least 98%, at least 99%, or 100% identity to SEQ ID NO:283; VL3 comprises an amino acid sequence having at least 80%, at least 85%, at least 90%, at least 91%, at least 92%, at least 93%, at least 94%, at least 95%, at least 96%, at least 97%, at least 98%, at least 99%, or 100% identity to SEQ ID NO:275; and VL4 comprises an amino acid sequence having at least 80%, at least 85%, at least 90%, at least 91%, at least 92%, at least 93%, at least 94%, at least 95%, at least 96%, at least 97%, at least 98%, at least 99%, or 100% identity to SEQ ID NO:259. In some aspects, VH1 comprises the amino acid sequence of SEQ ID NO:58; VH2 comprises the amino acid sequence of SEQ ID NO:287; VH3 comprises the amino acid sequence of SEQ ID NO:279; VH4 comprises the amino acid sequence of SEQ ID NO:263; VL1 comprises the amino acid sequence of SEQ ID NO:54; VL2 comprises the amino acid sequence of SEQ ID NO:283; VL3 comprises the amino acid sequence of SEQ ID NO:275; and VL4 comprises the amino acid sequence of SEQ ID NO:259. In some aspects, L1-L16 comprise the amino acid sequence of any one of SEQ ID NOs:1-34, wherein SEQ ID NO:1 has the amino acid sequence of G, SEQ ID NO:2 has the amino acid sequence of A, SEQ ID NO:3 has the amino acid sequence of GSS and SEQ ID NO:4 has the amino acid sequence of ASG. In some aspects, L1 or L4 and L7 or L10 comprise the amino acid sequence of SEQ ID NO:6; L2 or L5 and L8 or L11 comprise the amino acid sequence of SEQ ID NO:27; and L3 or L6 and L9 or L12 comprise the amino acid sequence of SEQ ID NO:6. In some aspects, L1 or L5 and L9 or L13 comprise the amino acid sequence of SEQ ID NO:6; L2 or L6 and L10 or L14 comprise the amino acid sequence of SEQ ID NO:27; L3 or L7 and L11 or L15 comprise the amino acid sequence of SEQ ID NO:6; and L4 or L8 and L12 or L16 comprise the amino acid sequence of SEQ ID NO:12. In some aspects, Fc comprises a knob-into-hole modification or Fc effector function knockout mutation. In some aspects, Fc comprises an amino acid sequence having at least 80%, at least 85%, at least 90%, at least 91%, at least 92%, at least 93%, at least 94%, at least 95%, at least 96%, at least 97%, at least 98%, at least 99%, or 100% identity to SEQ ID NO:293 or 294. In some aspects, Fc comprises the amino acid sequence of SEQ ID NO:293 or 294. In some aspects, the sequence has a mutation at N62, for example, N62Q or N62Q at, for example, SEQ ID NO:279. In some preferred aspects, VH1, VH2, VH3, VH4, VL1, VL2, VL3 and VL4 have at least 90% identity with the corresponding amino acid sequences specified above, optionally with (i) an Fc having at least 90% identity with the corresponding amino acid sequence recited above; (ii) one or more linker sequence as specified above; and/or (iii) a mutation at N62 as recited above. In some particularly preferred aspects, VH1, VH2, VH3, VH4, VL1, VL2, VL3 and VL4 comprise or consist of the corresponding amino acid sequences specified above, optionally with (i) an Fc comprising or consisting of the corresponding amino acid sequence recited above; (ii) one or more linker sequence as specified above; and/or (iii) a mutation at N62 as recited above.

[0812] In some aspects, the first polypeptide comprises an amino acid sequence having at least 80%, at least 85%, at least 90%, at least 91%, at least 92%, at least 93%, at least 94%, at least 95%, at least 96%, at least 97%, at least 98%, at least 99%, or 100% identity to SEQ ID NO:491; and the second polypeptide comprises an amino acid sequence having at least 80%, at least 85%, at least 90%, at least 91%, at least 92%, at least 93%, at least 94%, at least 95%, at least 96%, at least 97%, at least 98%, at least 99%, or 100% identity to SEQ ID NO:493. In some aspects, the first polypeptide has at least 90% identity to SEQ ID NO:491 and the second polypeptide has at least 90% identity to SEQ ID NO:493. In some aspects, the first polypeptide comprises the amino acid sequence of SEQ ID NO:491; and the second polypeptide comprises the amino acid sequence of SEQ ID NO:493. In some aspects, the first polypeptide comprises an amino acid sequence encoded by a polynucleotide having at least 80%, at least 85%, at least 90%, at least 91%, at least 92%, at least 93%, at least 94%, at least 95%, at least 96%, at least 97%, at least 98%, at least 99%, or 100% identity to SEQ ID NO:492; and the second polypeptide comprises an amino acid sequence encoded by a polynucleotide having at least 80%, at least 85%, at least 90%, at least 91%, at least 92%, at least 93%, at least 94%, at least 95%, at least 96%, at least 97%, at least 98%, at least 99%, or 100% identity to SEQ ID NO:494. In some aspects, the first polypeptide comprises an amino acid sequence encoded by a polynucleotide having at least 90% identity to SEQ ID NO:492 and the second polypeptide comprises an amino acid sequence encoded by a polynucleotide having at least 90% identity to SEQ ID NO:494. In some aspects, the first polypeptide comprises an amino acid sequence encoded by the polynucleotide of SEQ ID NO:492; and the second polypeptide comprises an amino acid sequence encoded by the polynucleotide of SEQ ID NO:494.

[0813] In some aspects, VH1 comprises an amino acid sequence having at least 80%, at least 85%, at least 90%, at least 91%, at least 92%, at least 93%, at least 94%, at least 95%, at least 96%, at least 97%, at least 98%, at least 99%, or 100% identity to SEQ ID NO:58; VH2 comprises an amino acid sequence having at least 80%, at least 85%, at least 90%, at least 91%, at least 92%, at least 93%, at least 94%, at least 95%, at least 96%, at least 97%, at least 98%, at least 99%, or 100% identity to SEQ ID NO:263; VH3 comprises an amino acid sequence having at least 80%, at least 85%, at least 90%, at least 91%, at least 92%, at least 93%, at least 94%, at least 95%, at least 96%, at least 97%, at least 98%, at least 99%, or 100% identity to SEQ ID NO:271; VH4 comprises an amino acid sequence having at least 80%, at least 85%, at least 90%, at least 91%, at least 92%, at least 93%, at least 94%, at least 95%, at least 96%, at least 97%, at least 98%, at least 99%, or 100% identity to SEQ ID NO:279; VL1 comprises an amino acid sequence having at least 80%, at least 85%, at least 90%, at least 91%, at least 92%, at least 93%, at least 94%, at least 95%, at least 96%, at least 97%, at least 98%, at least 99%, or 100% identity to SEQ ID NO:54; VL2 comprises an amino acid sequence having at least 80%, at least 85%, at least 90%, at least 91%, at least 92%, at least 93%, at least 94%, at least 95%, at least 96%, at least 97%, at least 98%, at least 99%, or 100% identity to SEQ ID NO:259; VL3 comprises an amino acid sequence having at least 80%, at least 85%, at least 90%, at least 91%, at least 92%, at least 93%, at least 94%, at least 95%, at least 96%, at least 97%, at least 98%, at least 99%, or 100% identity to SEQ ID NO:267; and VL4 comprises an amino acid sequence having at least 80%, at least 85%, at least 90%, at least 91%, at least 92%, at least 93%, at least 94%, at least 95%, at least 96%, at least 97%, at least 98%, at least 99%, or 100% identity to SEQ ID NO:275. In some aspects, VH1 comprises the amino acid sequence of SEQ ID NO:58; VH2 comprises the amino acid sequence of SEQ ID NO:263; VH3 comprises the amino acid sequence of SEQ ID NO:271; VH4 comprises the amino acid sequence of SEQ ID NO:279; VL1 comprises the amino acid sequence of SEQ ID NO:54; VL2 comprises the amino acid sequence of SEQ ID NO:259; VL3 comprises the amino acid sequence of SEQ ID NO:267; and VL4 comprises the amino acid sequence of SEQ ID NO:275. In some aspects, L1-L16 comprise the amino acid sequence of any one of SEQ ID NOs:1-34, wherein SEQ ID NO:1 has the amino acid sequence of G, SEQ ID NO:2 has the amino acid sequence of A, SEQ ID NO:3 has the amino acid sequence of GSS and SEQ ID NO:4 has the amino acid sequence of ASG. In some aspects, L1 or L4 and L7 or L10 comprise the amino acid sequence of SEQ ID NO:6; L2 or L5 and L8 or L11 comprise the amino acid sequence of SEQ ID NO:27; and L3 or L6 and L9 or L12 comprise the amino acid sequence of SEQ ID NO:6. In some aspects, L1 or L5 and L9 or L13 comprise the amino acid sequence of SEQ ID NO:6; L2 or L6 and L10 or L14 comprise the amino acid sequence of SEQ ID NO:27; L3 or L7 and L11 or L15 comprise the amino acid sequence of SEQ ID NO:6; and L4 or L8 and L12 or L16 comprise the amino acid sequence of SEQ ID NO:12. In some aspects, Fc comprises a knob-into-hole modification or Fc effector function knockout mutation. In some aspects, Fc comprises an amino acid sequence having at least 80%, at least 85%, at least 90%, at least 91%, at least 92%, at least 93%, at least 94%, at least 95%, at least 96%, at least 97%, at least 98%, at least 99%, or 100% identity to SEQ ID NO:293 or 294. In some aspects, Fc comprises the amino acid sequence of SEQ ID NO:293 or 294. In some aspects, the sequence has a mutation at N62, for example, N62Q or N62Q at, for example, SEQ ID NO:279. In some preferred aspects, VH1, VH2, VH3, VH4, VL1, VL2, VL3 and VL4 have at least 90% identity with the corresponding amino acid sequences specified above, optionally with (i) an Fc having at least 90% identity with the corresponding amino acid sequence recited above; (ii) one or more linker sequence as specified above; and/or (iii) a mutation at N62 as recited above. In some particularly preferred aspects, VH1, VH2, VH3, VH4, VL1, VL2, VL3 and VL4 comprise or consist of the corresponding amino acid sequences specified above, optionally with (i) an Fc comprising or consisting of the corresponding amino acid sequence recited above; (ii) one or more linker sequence as specified above; and/or (iii) a mutation at N62 as recited above.

[0814] In some aspects, the first polypeptide comprises an amino acid sequence having at least 80%, at least 85%, at least 90%, at least 91%, at least 92%, at least 93%, at least 94%, at least 95%, at least 96%, at least 97%, at least 98%, at least 99%, or 100% identity to SEQ ID NO:495; and the second polypeptide comprises an amino acid sequence having at least 80%, at least 85%, at least 90%, at least 91%, at least 92%, at least 93%, at least 94%, at least 95%, at least 96%, at least 97%, at least 98%, at least 99%, or 100% identity to SEQ ID NO:497. In some aspects, the first polypeptide has at least 90% identity to SEQ ID NO:495 and the second polypeptide has at least 90% identity to SEQ ID NO:497. In some aspects, the first polypeptide comprises the amino acid sequence of SEQ ID NO:495; and the second polypeptide comprises the amino acid sequence of SEQ ID NO:497. In some aspects, the first polypeptide comprises an amino acid sequence encoded by a polynucleotide having at least 80%, at least 85%, at least 90%, at least 91%, at least 92%, at least 93%, at least 94%, at least 95%, at least 96%, at least 97%, at least 98%, at least 99%, or 100% identity to SEQ ID NO:496; and the second polypeptide comprises an amino acid sequence encoded by a polynucleotide having at least 80%, at least 85%, at least 90%, at least 91%, at least 92%, at least 93%, at least 94%, at least 95%, at least 96%, at least 97%, at least 98%, at least 99%, or 100% identity to SEQ ID NO:498. In some aspects, the first polypeptide comprises an amino acid sequence encoded by a polynucleotide having at least 90% identity to SEQ ID NO:496 and the second polypeptide comprises an amino acid sequence encoded by a polynucleotide having at least 90% identity to SEQ ID NO:498. In some aspects, the first polypeptide comprises an amino acid sequence encoded by the polynucleotide of SEQ ID NO:496; and the second polypeptide comprises an amino acid sequence encoded by the polynucleotide of SEQ ID NO:498.

[0815] In some aspects, VH1 comprises an amino acid sequence having at least 80%, at least 85%, at least 90%, at least 91%, at least 92%, at least 93%, at least 94%, at least 95%, at least 96%, at least 97%, at least 98%, at least 99%, or 100% identity to SEQ ID NO:58; VH2 comprises an amino acid sequence having at least 80%, at least 85%, at least 90%, at least 91%, at least 92%, at least 93%, at least 94%, at least 95%, at least 96%, at least 97%, at least 98%, at least 99%, or 100% identity to SEQ ID NO:263; VH3 comprises an amino acid sequence having at least 80%, at least 85%, at least 90%, at least 91%, at least 92%, at least 93%, at least 94%, at least 95%, at least 96%, at least 97%, at least 98%, at least 99%, or 100% identity to SEQ ID NO:279; VH4 comprises an amino acid sequence having at least 80%, at least 85%, at least 90%, at least 91%, at least 92%, at least 93%, at least 94%, at least 95%, at least 96%, at least 97%, at least 98%, at least 99%, or 100% identity to SEQ ID NO:287; VL1 comprises an amino acid sequence having at least 80%, at least 85%, at least 90%, at least 91%, at least 92%, at least 93%, at least 94%, at least 95%, at least 96%, at least 97%, at least 98%, at least 99%, or 100% identity to SEQ ID NO:54; VL2 comprises an amino acid sequence having at least 80%, at least 85%, at least 90%, at least 91%, at least 92%, at least 93%, at least 94%, at least 95%, at least 96%, at least 97%, at least 98%, at least 99%, or 100% identity to SEQ ID NO:259; VL3 comprises an amino acid sequence having at least 80%, at least 85%, at least 90%, at least 91%, at least 92%, at least 93%, at least 94%, at least 95%, at least 96%, at least 97%, at least 98%, at least 99%, or 100% identity to SEQ ID NO:275; and VL4 comprises an amino acid sequence having at least 80%, at least 85%, at least 90%, at least 91%, at least 92%, at least 93%, at least 94%, at least 95%, at least 96%, at least 97%, at least 98%, at least 99%, or 100% identity to SEQ ID NO:283. In some aspects, VH1 comprises the amino acid sequence of SEQ ID NO:58; VH2 comprises the amino acid sequence of SEQ ID NO:263; VH3 comprises the amino acid sequence of SEQ ID NO:279; VH4 comprises the amino acid sequence of SEQ ID NO:287; VL1 comprises the amino acid sequence of SEQ ID NO:54; VL2 comprises the amino acid sequence of SEQ ID NO:259; VL3 comprises the amino acid sequence of SEQ ID NO:275; and VL4 comprises the amino acid sequence of SEQ ID NO:283. In some aspects, L1-L16 comprise the amino acid sequence of any one of SEQ ID NOs:1-34, wherein SEQ ID NO:1 has the amino acid sequence of G, SEQ ID NO:2 has the amino acid sequence of A, SEQ ID NO:3 has the amino acid sequence of GSS and SEQ ID NO:4 has the amino acid sequence of ASG. In some aspects, L1 or L4 and L7 or L10 comprise the amino acid sequence of SEQ ID NO:6; L2 or L5 and L8 or L11 comprise the amino acid sequence of SEQ ID NO:27; and L3 or L6 and L9 or L12 comprise the amino acid sequence of SEQ ID NO:6. In some aspects, L1 or L5 and L9 or L13 comprise the amino acid sequence of SEQ ID NO:6; L2 or L6 and L10 or L14 comprise the amino acid sequence of SEQ ID NO:27; L3 or L7 and L11 or L15 comprise the amino acid sequence of SEQ ID NO:6; and L4 or L8 and L12 or L16 comprise the amino acid sequence of SEQ ID NO:12. In some aspects, Fc comprises a knob-into-hole modification or Fc effector function knockout mutation. In some aspects, Fc comprises an amino acid sequence having at least 80%, at least 85%, at least 90%, at least 91%, at least 92%, at least 93%, at least 94%, at least 95%, at least 96%, at least 97%, at least 98%, at least 99%, or 100% identity to SEQ ID NO:293 or 294. In some aspects, Fc comprises the amino acid sequence of SEQ ID NO:293 or 294. In some aspects, the sequence has a mutation at N62, for example, N62Q or N62Q at, for example, SEQ ID NO:279. In some preferred aspects, VH1, VH2, VH3, VH4, VL1, VL2, VL3 and VL4 have at least 90% identity with the corresponding amino acid sequences specified above, optionally with (i) an Fc having at least 90% identity with the corresponding amino acid sequence recited above; (ii) one or more linker sequence as specified above; and/or (iii) a mutation at N62 as recited above. In some particularly preferred aspects, VH1, VH2, VH3, VH4, VL1, VL2, VL3 and VL4 comprise or consist of the corresponding amino acid sequences specified above, optionally with (i) an Fc comprising or consisting of the corresponding amino acid sequence recited above; (ii) one or more linker sequence as specified above; and/or (iii) a mutation at N62 as recited above.

[0816] In some aspects, the first polypeptide comprises an amino acid sequence having at least 80%, at least 85%, at least 90%, at least 91%, at least 92%, at least 93%, at least 94%, at least 95%, at least 96%, at least 97%, at least 98%, at least 99%, or 100% identity to SEQ ID NO:499; and the second polypeptide comprises an amino acid sequence having at least 80%, at least 85%, at least 90%, at least 91%, at least 92%, at least 93%, at least 94%, at least 95%, at least 96%, at least 97%, at least 98%, at least 99%, or 100% identity to SEQ ID NO:501. In some aspects, the first polypeptide has at least 90% identity to SEQ ID NO:499 and the second polypeptide has at least 90% identity to SEQ ID NO:501. In some aspects, the first polypeptide comprises the amino acid sequence of SEQ ID NO:499; and the second polypeptide comprises the amino acid sequence of SEQ ID NO:501. In some aspects, the first polypeptide comprises an amino acid sequence encoded by a polynucleotide having at least 80%, at least 85%, at least 90%, at least 91%, at least 92%, at least 93%, at least 94%, at least 95%, at least 96%, at least 97%, at least 98%, at least 99%, or 100% identity to SEQ ID NO:500; and the second polypeptide comprises an amino acid sequence encoded by a polynucleotide having at least 80%, at least 85%, at least 90%, at least 91%, at least 92%, at least 93%, at least 94%, at least 95%, at least 96%, at least 97%, at least 98%, at least 99%, or 100% identity to SEQ ID NO:502. In some aspects, the first polypeptide comprises an amino acid sequence encoded by a polynucleotide having at least 90% identity to SEQ ID NO:500 and the second polypeptide comprises an amino acid sequence encoded by a polynucleotide having at least 90% identity to SEQ ID NO:502. In some aspects, the first polypeptide comprises an amino acid sequence encoded by the polynucleotide of SEQ ID NO:500; and the second polypeptide comprises an amino acid sequence encoded by the polynucleotide of SEQ ID NO:502.

[0817] In some aspects, VH1 comprises an amino acid sequence having at least 80%, at least 85%, at least 90%, at least 91%, at least 92%, at least 93%, at least 94%, at least 95%, at least 96%, at least 97%, at least 98%, at least 99%, or 100% identity to SEQ ID NO:58; VH2 comprises an amino acid sequence having at least 80%, at least 85%, at least 90%, at least 91%, at least 92%, at least 93%, at least 94%, at least 95%, at least 96%, at least 97%, at least 98%, at least 99%, or 100% identity to SEQ ID NO:271; VH3 comprises an amino acid sequence having at least 80%, at least 85%, at least 90%, at least 91%, at least 92%, at least 93%, at least 94%, at least 95%, at least 96%, at least 97%, at least 98%, at least 99%, or 100% identity to SEQ ID NO:279; VH4 comprises an amino acid sequence having at least 80%, at least 85%, at least 90%, at least 91%, at least 92%, at least 93%, at least 94%, at least 95%, at least 96%, at least 97%, at least 98%, at least 99%, or 100% identity to SEQ ID NO:287; VL1 comprises an amino acid sequence having at least 80%, at least 85%, at least 90%, at least 91%, at least 92%, at least 93%, at least 94%, at least 95%, at least 96%, at least 97%, at least 98%, at least 99%, or 100% identity to SEQ ID NO:54; VL2 comprises an amino acid sequence having at least 80%, at least 85%, at least 90%, at least 91%, at least 92%, at least 93%, at least 94%, at least 95%, at least 96%, at least 97%, at least 98%, at least 99%, or 100% identity to SEQ ID NO:267; VL3 comprises an amino acid sequence having at least 80%, at least 85%, at least 90%, at least 91%, at least 92%, at least 93%, at least 94%, at least 95%, at least 96%, at least 97%, at least 98%, at least 99%, or 100% identity to SEQ ID NO:275; and VL4 comprises an amino acid sequence having at least 80%, at least 85%, at least 90%, at least 91%, at least 92%, at least 93%, at least 94%, at least 95%, at least 96%, at least 97%, at least 98%, at least 99%, or 100% identity to SEQ ID NO:283. In some aspects, VH1 comprises the amino acid sequence of SEQ ID NO:58; VH2 comprises the amino acid sequence of SEQ ID NO:271; VH3 comprises the amino acid sequence of SEQ ID NO:279; VH4 comprises the amino acid sequence of SEQ ID NO:287; VL1 comprises the amino acid sequence of SEQ ID NO:54; VL2 comprises the amino acid sequence of SEQ ID NO:267; VL3 comprises the amino acid sequence of SEQ ID NO:275; and VL4 comprises the amino acid sequence of SEQ ID NO:283. In some aspects, L1-L16 comprise the amino acid sequence of any one of SEQ ID NOs:1-34, wherein SEQ ID NO:1 has the amino acid sequence of G, SEQ ID NO:2 has the amino acid sequence of A, SEQ ID NO:3 has the amino acid sequence of GSS and SEQ ID NO:4 has the amino acid sequence of ASG. In some aspects, L1 or L4 and L7 or L10 comprise the amino acid sequence of SEQ ID NO:6; L2 or L5 and L8 or L11 comprise the amino acid sequence of SEQ ID NO:27; and L3 or L6 and L9 or L12 comprise the amino acid sequence of SEQ ID NO:6. In some aspects, L1 or L5 and L9 or L13 comprise the amino acid sequence of SEQ ID NO:6; L2 or L6 and L10 or L14 comprise the amino acid sequence of SEQ ID NO:27; L3 or L7 and L11 or L15 comprise the amino acid sequence of SEQ ID NO:6; and L4 or L8 and L12 or L16 comprise the amino acid sequence of SEQ ID NO:12. In some aspects, Fc comprises a knob-into-hole modification or Fc effector function knockout mutation. In some aspects, Fc comprises an amino acid sequence having at least 80%, at least 85%, at least 90%, at least 91%, at least 92%, at least 93%, at least 94%, at least 95%, at least 96%, at least 97%, at least 98%, at least 99%, or 100% identity to SEQ ID NO:293 or 294. In some aspects, Fc comprises the amino acid sequence of SEQ ID NO:293 or 294. In some aspects, the sequence has a mutation at N62, for example, N62Q or N62Q at, for example, SEQ ID NO:279. In some preferred aspects, VH1, VH2, VH3, VH4, VL1, VL2, VL3 and VL4 have at least 90% identity with the corresponding amino acid sequences specified above, optionally with (i) an Fc having at least 90% identity with the corresponding amino acid sequence recited above; (ii) one or more linker sequence as specified above; and/or (iii) a mutation at N62 as recited above. In some particularly preferred aspects, VH1, VH2, VH3, VH4, VL1, VL2, VL3 and VL4 comprise or consist of the corresponding amino acid sequences specified above, optionally with (i) an Fc comprising or consisting of the corresponding amino acid sequence recited above; (ii) one or more linker sequence as specified above; and/or (iii) a mutation at N62 as recited above.

[0818] In some aspects, the first polypeptide comprises an amino acid sequence having at least 80%, at least 85%, at least 90%, at least 91%, at least 92%, at least 93%, at least 94%, at least 95%, at least 96%, at least 97%, at least 98%, at least 99%, or 100% identity to SEQ ID NO:503; and the second polypeptide comprises an amino acid sequence having at least 80%, at least 85%, at least 90%, at least 91%, at least 92%, at least 93%, at least 94%, at least 95%, at least 96%, at least 97%, at least 98%, at least 99%, or 100% identity to SEQ ID NO:505. In some aspects, the first polypeptide has at least 90% identity to SEQ ID NO:503 and the second polypeptide has at least 90% identity to SEQ ID NO:505. In some aspects, the first polypeptide comprises the amino acid sequence of SEQ ID NO:503; and the second polypeptide comprises the amino acid sequence of SEQ ID NO:505. In some aspects, the first polypeptide comprises an amino acid sequence encoded by a polynucleotide having at least 80%, at least 85%, at least 90%, at least 91%, at least 92%, at least 93%, at least 94%, at least 95%, at least 96%, at least 97%, at least 98%, at least 99%, or 100% identity to SEQ ID NO:504; and the second polypeptide comprises an amino acid sequence encoded by a polynucleotide having at least 80%, at least 85%, at least 90%, at least 91%, at least 92%, at least 93%, at least 94%, at least 95%, at least 96%, at least 97%, at least 98%, at least 99%, or 100% identity to SEQ ID NO:506. In some aspects, the first polypeptide comprises an amino acid sequence encoded by a polynucleotide having at least 90% identity to SEQ ID NO:504 and the second polypeptide comprises an amino acid sequence encoded by a polynucleotide having at least 90% identity to SEQ ID NO:506. In some aspects, the first polypeptide comprises an amino acid sequence encoded by the polynucleotide of SEQ ID NO:504; and the second polypeptide comprises an amino acid sequence encoded by the polynucleotide of SEQ ID NO:506.

[0819] In some aspects, an antigen binding polypeptide provided herein is part of a hexavalent antigen binding polypeptide complex. Such polypeptides can have any VH, VL, CDR, CH1, CL, Fc or amino acid linker sequence disclosed herein. For example, provided herein is an antigen binding polypeptide having a structure represented by VL1-VL2-VL3-VH3-VH2-VH1; VH1-VH2-VH3-VL3-VL2-VL1; VL1-VH2-VL3-VH3-VL2-VH1; VH1-VL2-VH3-VL3-VH2-VL1; VL1-VL2-VH3-VL3-VH2-VH1; VH1-VH2-VL3-VH3-VL2-VL1; VL1-VH2-VH3-VL3-VL2-VH1; VH1-VL2-VL3-VH3-VH2-VL1; VL1-L1-VL2-L2-VL3-L3-VH3-L4-VH2-L5-VH1; VH1-L1-VH2-L2-VH3-L3-VL3-L4-VL2-L5-VL1; VL1-L1-VH2-L2-VL3-L3-VH3-L4-VL2-L5-VH1; VH1-L1-VL2-L2-VH3-L3-VL3-L4-VH2-L5-VL1; VL1-L1-VL2-L2-VH3-L3-VL3-L4-VH2-L5-VH1; VH1-L1-VH2-L2-VL3-L3-VH3-L4-VL2-L5-VL1; VL1-L1-VH2-L2-VH3-L3-VL3-L4-VL2-L5-VH1; or VH1-L1-VL2-L2-VL3-L3-VH3-L4-VH2-L5-VL1; wherein VL11 is a first immunoglobulin light chain variable region; VL2 is a second immunoglobulin light chain variable region; VL3 is a third immunoglobulin light chain variable region; VH1 is a first immunoglobulin heavy chain variable region; VH2 is a second immunoglobulin heavy chain variable region; VH3 is a third immunoglobulin heavy chain variable region; and L1, L2, L3, L4 and L5 are amino acid linkers.

[0820] In some aspects, an antigen binding polypeptide complex provided herein is hexavalent. Such complexes can have any VH, VL, CDR, CH1, CL, Fc or amino acid linker sequence disclosed herein. For example, an antigen binding polypeptide complex can comprise a first polypeptide and a second polypeptide; wherein the first polypeptide has a structure represented by VL1-VL2-VL3-VH3-VH2-VH1; VH1-VH2-VH3-VL3-VL2-VL1; VL1-VH2-VL3-VH3-VL2-VH1; VH1-VL2-VH3-VL3-VH2-VL1; VL1-VL2-VH3-VL3-VH2-VH1; VH1-VH2-VL3-VH3-VL2-VL1; VL1-VH2-VH3-VL3-VL2-VH1; VH1-VL2-VL3-VH3-VH2-VL1; VL1-L1-VL2-L2-VL3-L3-VH3-L4-VH2-L5-VH1; VH1-L1-VH2-L2-VH3-L3-VL3-L4-VL2-L5-VL1; VL1-L1-VH2-L2-VL3-L3-VH3-L4-VL2-L5-VH1; VH1-L1-VL2-L2-VH3-L3-VL3-L4-VH2-L5-VL1; VL1-L1-VL2-L2-VH3-L3-VL3-L4-VH2-L5-VH1; VH1-L1-VH2-L2-VL3-L3-VH3-L4-VL2-L5-VL1; VL1-L1-VH2-L2-VH3-L3-VL3-L4-VL2-L5-VH1; or VH1-L1-VL2-L2-VL3-L3-VH3-L4-VH2-L5-VL1; wherein the second polypeptide has a structure represented by VL4-VH4; VH4-VL4; VL4-L6-VH4; VH4-L6-VL4; VL4-VL5-VH5-VH4; VH4-VH5-VL5-VL4; VL4-L6-VL5-L7-VH5-L8-VH4; VH4-L6-VH5-L7-VL5-L8-VL4; VL4-VL5-VL6-VH6-VH5-VH4; VH4-VH5-VH6-VL6-VL5-VL4; VL4-VH5-VL6-VH6-VL5-VH4; VH4-VL5-VH6-VL6-VH5-VL4; VL4-VL5-VH6-VL6-VH5-VH4; VH4-VH5-VL6-VH6-VL5-VL4; VL4-VH5-VH6-VL6-VL5-VH4; VH4-VL5-VL6-VH6-VH5-VL4; VL4-L6-VL5-L7-VL6-L8-VH6-L9-VH5-L10-VH4; VH4-L6-VH5-L7-VH6-L8-VL6-L9-VL5-L10-VL4; VL4-L6-VH5-L7-VL6-L8-VH6-L9-VL5-L10-VH4; VH4-L6-VL5-L7-VH6-L8-VL6-L9-VH5-L10-VL4; VL4-L6-VL5-L7-VH6-L8-VL6-L9-VH5-L10-VH4; VH4-L6-VH5-L7-VL6-L8-VH6-L9-VL5-L10-VL4; VL4-L6-VH5-L7-VH6-L8-VL6-L9-VL5-L10-VH4; or VH4-L6-VL5-L7-VL6-L8-VH6-L9-VH5-L10-VL4; wherein VL1 is a first immunoglobulin light chain variable region; VL2 is a second immunoglobulin light chain variable region; VL3 is a third immunoglobulin light chain variable region; VL4 is a fourth immunoglobulin light chain variable region; VL5 is a fifth immunoglobulin light chain variable region; VL6 is a sixth immunoglobulin light chain variable region; VH1 is a first immunoglobulin heavy chain variable region; VH2 is a second immunoglobulin heavy chain variable region; VH3 is a third immunoglobulin heavy chain variable region; VH4 is a fourth immunoglobulin heavy chain variable region; VH5 is a fifth immunoglobulin heavy chain variable region; VH6 is a sixth immunoglobulin heavy chain variable region; and L1, L2, L3, L4, L5, L6, L7, L8, L9 and L10 are amino acid linkers. Any combination of VH1, VH2, VH3 and/or VH4 described above may be used in combination with any combination of VL1, VL2, VL3 and/or VL4 described above. Thus, any first polypeptide described above may be used in any combination with any second polypeptide described above.

[0821] In some aspects, an antigen binding polypeptide provided herein has a structure represented by VL1-VL2-VL3-VH3-VH2-VH1-Fc; VH1-VH2-VH3-VL3-VL2-VL1-Fc; VL1-VH2-VL3-VH3-VL2-VH1-Fc; VH1-VL2-VH3-VL3-VH2-VL1-Fc; VL1-VL2-VH3-VL3-VH2-VH1-Fc; VH1-VH2-VL3-VH3-VL2-VL1-Fc; VL1-VH2-VH3-VL3-VL2-VH1-Fc; VH1-VL2-VL3-VH3-VH2-VL1-Fc; VL1-L1-VL2-L2-VL3-L3-VH3-L4-VH2-L5-VH1-Fc; VL1-L1-VL2-L2-VL3-L3-VH3-L4-VH2-L5-VH1-L6-Fc; VH1-L1-VH2-L2-VH3-L3-VL3-L4-VL2-L5-VL1-Fc; VH1-L1-VH2-L2-VH3-L3-VL3-L4-VL2-L5-VL1-L6-Fc; VL1-L1-VH2-L2-VL3-L3-VH3-L4-VL2-L5-VH1-Fc; VL1-L1-VH2-L2-VL3-L3-VH3-L4-VL2-L5-VH1-L6-Fc; VH1-L1-VL2-L2-VH3-L3-VL3-L4-VH2-L5-VL1-Fc; VH1-L1-VL2-L2-VH3-L3-VL3-L4-VH2-L5-VL1-L6-Fc; VL1-L1-VL2-L2-VH3-L3-VL3-L4-VH2-L5-VH1-Fc; VL1-L1-VL2-L2-VH3-L3-VL3-L4-VH2-L5-VH1-L6-Fc; VH1-L1-VH2-L2-VL3-L3-VH3-L4-VL2-L5-VL1-Fc; VH1-L1-VH2-L2-VL3-L3-VH3-L4-VL2-L5-VL1-L6-Fc; VL1-L1-VH2-L2-VH3-L3-VL3-L4-VL2-L5-VH1-Fc; VL1-L1-VH2-L2-VH3-L3-VL3-L4-VL2-L5-VH1-L6-Fc; VH1-L1-VL2-L2-VL3-L3-VH3-L4-VH2-L5-VL1-Fc; or VH1-L1-VL2-L2-VL3-L3-VH3-L4-VH2-L5-VL1-L6-Fc; wherein VL1 is a first immunoglobulin light chain variable region; VL2 is a second immunoglobulin light chain variable region; VL3 is a third immunoglobulin light chain variable region; VH1 is a first immunoglobulin heavy chain variable region; VH2 is a second immunoglobulin heavy chain variable region; VH3 is a third immunoglobulin heavy chain variable region; Fc is a region comprising an immunoglobulin heavy chain constant region 2 (CH2), an immunoglobulin heavy chain constant region 3 (CH3), and optionally, an immunoglobulin hinge; and L1, L2, L3, L4, L5 and L6 are amino acid linkers.

[0822] In some aspects, an antigen binding polypeptide provided herein has a structure represented by VL1-VL2-VL3-VH3-VH2-VH1-Fc-Fc; VH1-VH2-VH3-VL3-VL2-VL1-Fc-Fc; VL1-VH2-VL3-VH3-VL2-VH1-Fc-Fc; VH1-VL2-VH3-VL3-VH2-VL1-Fc-Fc; VL1-VL2-VH3-VL3-VH2-VH1-Fc-Fc; VH1-VH2-VL3-VH3-VL2-VL1-Fc-Fc; VL1-VH2-VH3-VL3-VL2-VH1-Fc-Fc; VH1-VL2-VL3-VH3-VH2-VL1-Fc-Fc; VL1-L1-VL2-L2-VL3-L3-VH3-L4-VH2-L5-VH1-Fc-Fc; VL1-L1-VL2-L2-VL3-L3-VH3-L4-VH2-L5-VH1-L6-Fc-Fc; VL1-L1-VL2-L2-VL3-L3-VH3-L4-VH2-L5-VH1-L6-Fc-L7-Fc; VH1-L1-VH2-L2-VH3-L3-VL3-L4-VL2-L5-VL1-Fc-Fc; VH1-L1-VH2-L2-VH3-L3-VL3-L4-VL2-L5-VL1-L6-Fc-Fc; VH1-L1-VH2-L2-VH3-L3-VL3-L4-VL2-L5-VL1-L6-Fc-L7-Fc; VL1-L1-VH2-L2-VL3-L3-VH3-L4-VL2-L5-VH1-Fc-Fc; VL1-L1-VH2-L2-VL3-L3-VH3-L4-VL2-L5-VH1-L6-Fc-Fc; VL1-L1-VH2-L2-VL3-L3-VH3-L4-VL2-L5-VH1-L6-Fc-L7-Fc; VH1-L1-VL2-L2-VH3-L3-VL3-L4-VH2-L5-VL1-Fc-Fc; VH1-L1-VL2-L2-VH3-L3-VL3-L4-VH2-L5-VL1-L6-Fc-Fc; VH1-L1-VL2-L2-VH3-L3-VL3-L4-VH2-L5-VL1-L6-Fc-L7-Fc; VL1-L1-VL2-L2-VH3-L3-VL3-L4-VH2-L5-VH1-Fc-Fc; VL1-L1-VL2-L2-VH3-L3-VL3-L4-VH2-L5-VH1-L6-Fc-Fc; VL1-L1-VL2-L2-VH3-L3-VL3-L4-VH2-L5-VH1-L6-Fc-L7-Fc; VH1-L1-VH2-L2-VL3-L3-VH3-L4-VL2-L5-VL1-Fc-Fc; VH1-L1-VH2-L2-VL3-L3-VH3-L4-VL2-L5-VL1-L6-Fc-Fc; VH1-L1-VH2-L2-VL3-L3-VH3-L4-VL2-L5-VL1-L6-Fc-L7-Fc; L1-L1-VH2-L2-VH3-L3-VL3-L4-VL2-L5-VH1-Fc-Fc; VL1-L1-VH2-L2-VH3-L3-VL3-L4-VL2-L5-VH1-L6-Fc-Fc; VL1-L1-VH2-L2-VH3-L3-VL3-L4-VL2-L5-VH1-L6-Fc-L7-Fc; VH1-L1-VL2-L2-VL3-L3-VH3-L4-VH2-L5-VL1-Fc-Fc; VH1-L1-VL2-L2-VL3-L3-VH3-L4-VH2-L5-VL1-L6-Fc-Fc; or VH1-L1-VL2-L2-VL3-L3-VH3-L4-VH2-L5-VL1-L6-Fc-L7-Fc; wherein VL1 is a first immunoglobulin light chain variable region; VL2 is a second immunoglobulin light chain variable region; VL3 is a third immunoglobulin light chain variable region; VH1 is a first immunoglobulin heavy chain variable region; VH2 is a second immunoglobulin heavy chain variable region; VH3 is a third immunoglobulin heavy chain variable region; Fc is a region comprising an immunoglobulin heavy chain constant region 2 (CH2), an immunoglobulin heavy chain constant region 3 (CH3), and optionally, an immunoglobulin hinge; and L1, L2, L3, L4, L5, L6 and L7 are amino acid linkers.

[0823] In some aspects, an antigen binding polypeptide complex provided herein comprises a first polypeptide and a second polypeptide; wherein the first polypeptide has a structure represented by VL1-VL2-VL3-VH3-VH2-VH1-Fc; VH1-VH2-VH3-VL3-VL2-VL1-Fc; VL1-VH2-VL3-VH3-VL2-VH1-Fc; VH1-VL2-VH3-VL3-VH2-VL1-Fc; VL1-VL2-VH3-VL3-VH2-VH1-Fc; VH1-VH2-VL3-VH3-VL2-VL1-Fc; VL1-VH2-VH3-VL3-VL2-VH1-Fc; VH1-VL2-VL3-VH3-VH2-VL1-Fc; VL1-L1-VL2-L2-VL3-L3-VH3-L4-VH2-L5-VH1-Fc; VL1-L1-VL2-L2-VL3-L3-VH3-L4-VH2-L5-VH1-L6-Fc; VH1-L1-VH2-L2-VH3-L3-VL3-L4-VL2-L5-VL1-Fc; VH1-L1-VH2-L2-VH3-L3-VL3-L4-VL2-L5-VL1-L6-Fc; VL1-L1-VH2-L2-VL3-L3-VH3-L4-VL2-L5-VH1-Fc; VL1-L1-VH2-L2-VL3-L3-VH3-L4-VL2-L5-VH1-L6-Fc; VH1-L1-VL2-L2-VH3-L3-VL3-L4-VH2-L5-VL1-Fc; VH1-L1-VL2-L2-VH3-L3-VL3-L4-VH2-L5-VL1-L6-Fc; VL1-L1-VL2-L2-VH3-L3-VL3-L4-VH2-L5-VH1-Fc; VL1-L1-VL2-L2-VH3-L3-VL3-L4-VH2-L5-VH1-L6-Fc; VH1-L1-VH2-L2-VL3-L3-VH3-L4-VL2-L5-VL1-Fc; VH1-L1-VH2-L2-VL3-L3-VH3-L4-VL2-L5-VL1-L6-Fc; VL1-L1-VH2-L2-VH3-L3-VL3-L4-VL2-L5-VH1-Fc; VL1-L1-VH2-L2-VH3-L3-VL3-L4-VL2-L5-VH1-L6-Fc; VH1-L1-VL2-L2-VL3-L3-VH3-L4-VH2-L5-VL1-Fc; or VH1-L1-VL2-L2-VL3-L3-VH3-L4-VH2-L5-VL1-L6-Fc; wherein the second polypeptide has a structure represented by Fc; VL4-VH4-Fc; VH4-VL4-Fc; VL4-L7-VH4-Fc; VH4-L7-VL4-Fc; VL4-L7-VH4-L8-Fc; VH4-L7-VL4-L8-Fc; VL4-CL-VH4-CH1-Fc; VH4-CL-VL4-CH1-Fc; VL4-CH1-VH4-CL-Fc; VH4-CH1-VL4-CL-Fc; VL4-L7-CL-L8-VH4-L9-CH1-Fc; VL4-L7-CL-L8-VH4-L9-CH1-L10-Fc; VH4-L7-CL-L8-VL4-L9-CH1-Fc; VH4-L7-CL-L8-VL4-L9-CH1-L10-Fc; VL4-L7-CH1-L8-VH4-L9-CL-Fc; VL4-L7-CH1-L8-VH4-L9-CL-L10-Fc; VH4-L7-CH1-L8-VL4-L9-CL-Fc; VH4-L7-CH1-L8-VL4-L9-CL-L10-Fc; VL4-VL5-VH5-VH4-Fc; VH4-VH5-VL5-VL4-Fc; VL4-L7-VL5-L8-VH5-L9-VH4-Fc; VH4-L7-VH5-L8-VL5-L9-VL4-Fc; VL4-L7-VL5-L8-VH5-L9-VH4-L10-Fc; VH4-L7-VH5-L8-VL5-L9-VL4-L10-Fc; VL4-VL5-VL6-VH6-VH5-VH4-Fc; VH4-VH5-VH6-VL6-VL5-VL4-Fc; VL4-VH5-VL6-VH6-VL5-VH4-Fc; VH4-VL5-VH6-VL6-VH5-VL4-Fc; VL4-VL5-VH6-VL6-VH5-VH4-Fc; VH4-VH5-VL6-VH6-VL5-VL4-Fc; VL4-VH5-VH6-VL6-VL5-VH4-Fc; VH4-VL5-VL6-VH6-VH5-VL4-Fc; VL4-L7-VL5-L8-VL6-L9-VH6-L10-VH5-L11-VH4-Fc; VH4-L7-VH5-L8-VH6-L9-VL6-L10-VL5-L11-VL4-Fc; VL4-L7-VH5-L8-VL6-L9-VH6-L10-VL5-L11-VH4-Fc; VH4-L7-VL5-L8-VH6-L9-VL6-L10-VH5-L11-VL4-Fc; VL4-L7-VL5-L8-VH6-L9-VL6-L10-VH5-L11-VH4-Fc; VH4-L7-VH5-L8-VL6-L9-VH6-L10-VL5-L11-VL4-Fc; VL4-L7-VH5-L8-VH6-L9-VL6-L10-VL5-L11-VH4-Fc; VH4-L7-VL5-L8-VL6-L9-VH6-L10-VH5-L11-VL4-Fc; VL4-L7-VL5-L8-VL6-L9-VH6-L10-VH5-L11-VH4-L12-Fc; VH4-L7-VH5-L8-VH6-L9-VL6-L10-VL5-L11-VL4-L12-Fc; VL4-L7-VH5-L8-VL6-L9-VH6-L10-VL5-L11-VH4-L12-Fc; VH4-L7-VL5-L8-VH6-L9-VL6-L10-VH5-L11-VL4-L12-Fc; VL4-L7-VL5-L8-VH6-L9-VL6-L10-VH5-L11-VH4-L12-Fc; VH4-L7-VH5-L8-VL6-L9-VH6-L10-VL5-L11-VL4-L12-Fc; VL4-L7-VH5-L8-VH6-L9-VL6-L10-VL5-L11-VH4-L12-Fc; or VH4-L7-VL5-L8-VL6-L9-VH6-L10-VH5-L11-VL4-L12-Fc; wherein VL1 is a first immunoglobulin light chain variable region; VL2 is a second immunoglobulin light chain variable region; VL3 is a third immunoglobulin light chain variable region; VL4 is a fourth immunoglobulin light chain variable region; VL5 is a fifth immunoglobulin light chain variable region; VL6 is a sixth immunoglobulin light chain variable region; VH1 is a first immunoglobulin heavy chain variable region; VH2 is a second immunoglobulin heavy chain variable region; VH3 is a third immunoglobulin heavy chain variable region; VH4 is a fourth immunoglobulin heavy chain variable region; VH5 is a fifth immunoglobulin heavy chain variable region; VH6 is a sixth immunoglobulin heavy chain variable region; Fc is a region comprising an immunoglobulin heavy chain constant region 2 (CH2), an immunoglobulin heavy chain constant region 3 (CH3), and optionally, an immunoglobulin hinge; CH1 is a heavy chain constant region 1; CL is a light chain constant region; and L1, L2, L3, L4, L5, L6, L7, L8, L9, L10, L11 and L12 are amino acid linkers. Any combination of VH1, VH2, VH3 and/or VH4 described above may be used in combination with any combination of VL1, VL2, VL3 and/or VL4 described above. Thus, any first polypeptide described above may be used in any combination with any second polypeptide described above.

[0824] In some aspects, an antigen binding polypeptide provided herein comprises a structure represented by VL1-VL2-VL3-VH3-VH2-VH1-CH1-CL; VL1-VL2-VL3-VH3-VH2-VH1-CL-CH1; VH1-VH2-VH3-VL3-VL2-VL1-CH1-CL; VH1-VH2-VH3-VL3-VL2-VL1-CL-CH1; VL1-VH2-VL3-VH3-VL2-VH1-CH1-CL; VL1-VH2-VL3-VH3-VL2-VH1-CL-CH1; VH1-VL2-VH3-VL3-VH2-VL1-CH1-CL; VH1-VL2-VH3-VL3-VH2-VL1-CL-CH1; VL1-VL2-VH3-VL3-VH2-VH1-CH1-CL; VL1-VL2-VH3-VL3-VH2-VH1-CL-CH1; VH1-VH2-VL3-VH3-VL2-VL1-CH1-CL; VH1-VH2-VL3-VH3-VL2-VL1-CL-CH1; VL1-VH2-VH3-VL3-VL2-VH1-CH1-CL; VL1-VH2-VH3-VL3-VL2-VH1-CL-CH1; VH1-VL2-VL3-VH3-VH2-VL1-CH1-CL; VH1-VL2-VL3-VH3-VH2-VL1-CL-CH1; VL1-L1-VL2-L2-VL3-L3-VH3-L4-VH2-L5-VH1-CH1-CL; VL1-L1-VL2-L2-VL3-L3-VH3-L4-VH2-L5-VH1-L6-CH1-CL; VL1-L1-VL2-L2-VL3-L3-VH3-L4-VH2-L5-VH1-CL-CH1; VL1-L1-VL2-L2-VL3-L3-VH3-L4-VH2-L5-VH1-L6-CL-CH1; VL1-L1-VL2-L2-VL3-L3-VH3-L4-VH2-L5-VH1-L6-CL-L7-CH1; VH1-L1-VH2-L2-VH3-L3-VL3-L4-VL2-L5-VL1-CH1-CL; VH1-L1-VH2-L2-VH3-L3-VL3-L4-VL2-L5-VL1-L6-CH1-CL; VH1-L1-VH2-L2-VH3-L3-VL3-L4-VL2-L5-VL1-L6-CH1-L7-CL; VH1-L1-VH2-L2-VH3-L3-VL3-L4-VL2-L5-VL1-CL-CH1; VH1-L1-VH2-L2-VH3-L3-VL3-L4-VL2-L5-VL1-L6-CL-CH1; VL1-L1-VH2-L2-VL3-L3-VH3-L4-VL2-L5-VH1-CH1-CL; VL1-L1-VH2-L2-VL3-L3-VH3-L4-VL2-L5-VH1-L6-CH1-CL; VL1-L1-VH2-L2-VL3-L3-VH3-L4-VL2-L5-VH1-L6-CH1-L7-CL; VL1-L1-VH2-L2-VL3-L3-VH3-L4-VL2-L5-VH1-CL-CH1; VL1-L1-VH2-L2-VL3-L3-VH3-L4-VL2-L5-VH1-L6-CL-CH1; VH1-L1-VL2-L2-VH3-L3-VL3-L4-VH2-L5-VL1-CH1-CL; VH1-L1-VL2-L2-VH3-L3-VL3-L4-VH2-L5-VL1-L6-CH1-CL; VH1-L1-VL2-L2-VH3-L3-VL3-L4-VH2-L5-VL1-L6-CH1-L7-CL; VH1-L1-VL2-L2-VH3-L3-VL3-L4-VH2-L5-VL1-CL-CH1; VH1-L1-VL2-L2-VH3-L3-VL3-L4-VH2-L5-VL1-L6-CL-CH1; VH1-L1-VL2-L2-VH3-L3-VL3-L4-VH2-L5-VL1-L6-CL-L7-CH1; VL1-L1-VL2-L2-VH3-L3-VL3-L4-VH2-L5-VH1-CH1-CL; VL1-L1-VL2-L2-VH3-L3-VL3-L4-VH2-L5-VH1-L6-CH1-CL; VL1-L1-VL2-L2-VH3-L3-VL3-L4-VH2-L5-VH1-L6-CH1-L7-CL; VL1-L1-VL2-L2-VH3-L3-VL3-L4-VH2-L5-VH1-CL-CH1; VL1-L1-VL2-L2-VH3-L3-VL3-L4-VH2-L5-VH1-L6-CL-CH1; VL1-L1-VL2-L2-VH3-L3-VL3-L4-VH2-L5-VH1-L6-CL-L7-CH1; VH1-L1-VH2-L2-VL3-L3-VH3-L4-VL2-L5-VL1-CH1-CL; VH1-L1-VH2-L2-VL3-L3-VH3-L4-VL2-L5-VL1-L6-CH1-CL; VH1-L1-VH2-L2-VL3-L3-VH3-L4-VL2-L5-VL1-L6-CH1-L7-CL; VH1-L1-VH2-L2-VL3-L3-VH3-L4-VL2-L5-VL1-CL-CH1; VH1-L1-VH2-L2-VL3-L3-VH3-L4-VL2-L5-VL1-L6-CL-CH1; VH1-L1-VH2-L2-VL3-L3-VH3-L4-VL2-L5-VL1-L6-CL-L7-CH1; VL1-L1-VH2-L2-VH3-L3-VL3-L4-VL2-L5-VH1-L6-CL; VL1-L1-VH2-L2-VH3-L3-VL3-L4-VL2-L5-VH1-CH1-CL; VL1-L1-VH2-L2-VH3-L3-VL3-L4-VL2-L5-VH1-L6-CH1-CL; VL1-L1-VH2-L2-VH3-L3-VL3-L4-VL2-L5-VH1-L6-CH1-L7-CL; VL1-L1-VH2-L2-VH3-L3-VL3-L4-VL2-L5-VH1-CL-CH1; VL1-L1-VH2-L2-VH3-L3-VL3-L4-VL2-L5-VH1-L6-CL-CH1; VL1-L1-VH2-L2-VH3-L3-VL3-L4-VL2-L5-VH1-L6-CL-L7-CH1; VH1-L1-VL2-L2-VL3-L3-VH3-L4-VH2-L5-VL1-CH1-CL; VH1-L1-VL2-L2-VL3-L3-VH3-L4-VH2-L5-VL1-L6-CH1-CL; VH1-L1-VL2-L2-VL3-L3-VH3-L4-VH2-L5-VL1-L6-CH1-L7-CL; VH1-L1-VL2-L2-VL3-L3-VH3-L4-VH2-L5-VL1-CL-CH1; VH1-L1-VL2-L2-VL3-L3-VH3-L4-VH2-L5-VL1-L6-CL-CH1; or VH1-L1-VL2-L2-VL3-L3-VH3-L4-VH2-L5-VL1-L6-CL-L7-CH1; wherein VL1 is a first immunoglobulin light chain variable region; VL2 is a second immunoglobulin light chain variable region; VL3 is a third immunoglobulin light chain variable region; VH1 is a first immunoglobulin heavy chain variable region; VH2 is a second immunoglobulin heavy chain variable region; VH3 is a third immunoglobulin heavy chain variable region; CH1 is a heavy chain constant region 1; CL is a light chain constant region; and L1, L2, L3, L4, L5, L6 and L7 are amino acid linkers.

[0825] In some aspects, an antigen binding polypeptide complex provided herein comprises a first polypeptide and a second polypeptide; wherein the first polypeptide has a structure represented by VL1-VL2-VL3-VH3-VH2-VH1-CH1; VL1-VL2-VL3-VH3-VH2-VH1-CL; VL1-VL2-VL3-VH3-VH2-VH1-CH1-CL; VL1-VL2-VL3-VH3-VH2-VH1-CL-CH1; VH1-VH2-VH3-VL3-VL2-VL1-CH1; VH1-VH2-VH3-VL3-VL2-VL1-CL; VH1-VH2-VH3-VL3-VL2-VL1-CH1-CL; VH1-VH2-VH3-VL3-VL2-VL1-CL-CH1; VL1-VH2-VL3-VH3-VL2-VH1-CH1; VL1-VH2-VL3-VH3-VL2-VH1-CL; VL1-VH2-VL3-VH3-VL2-VH1-CH1-CL; VL1-VH2-VL3-VH3-VL2-VH1-CL-CH1; VH1-VL2-VH3-VL3-VH2-VL1-CH1; VH1-VL2-VH3-VL3-VH2-VL1-CL; VH1-VL2-VH3-VL3-VH2-VL1-CH1-CL; VH1-VL2-VH3-VL3-VH2-VL1-CL-CH1; VL1-VL2-VH3-VL3-VH2-VH1-CH1; VL1-VL2-VH3-VL3-VH2-VH1-CL; VL1-VL2-VH3-VL3-VH2-VH1-CH1-CL; VL1-VL2-VH3-VL3-VH2-VH1-CL-CH1; VH1-VH2-VL3-VH3-VL2-VL1-CH1; VH1-VH2-VL3-VH3-VL2-VL1-CL; VH1-VH2-VL3-VH3-VL2-VL1-CH1-CL; VH1-VH2-VL3-VH3-VL2-VL1-CL-CH1; VL1-VH2-VH3-VL3-VL2-VH1-CH1; VL1-VH2-VH3-VL3-VL2-VH1-CL; VL1-VH2-VH3-VL3-VL2-VH1-CH1-CL; VL1-VH2-VH3-VL3-VL2-VH1-CL-CH1; VH1-VL2-VL3-VH3-VH2-VL1-CH1; VH1-VL2-VL3-VH3-VH2-VL1-CL; VH1-VL2-VL3-VH3-VH2-VL1-CH1-CL; VH1-VL2-VL3-VH3-VH2-VL1-CL-CH1; VL1-L1-VL2-L2-VL3-L3-VH3-L4-VH2-L5-VH1-CH1; VL1-L1-VL2-L2-VL3-L3-VH3-L4-VH2-L5-VH1-L6-CH1; VL1-L1-VL2-L2-VL3-L3-VH3-L4-VH2-L5-VH1-CL; VL1-L1-VL2-L2-VL3-L3-VH3-L4-VH2-L5-VH1-L6-CL; VL1-L1-VL2-L2-VL3-L3-VH3-L4-VH2-L5-VH1-CH1-CL; VL1-L1-VL2-L2-VL3-L3-VH3-L4-VH2-L5-VH1-L6-CH1-CL; VL1-L1-VL2-L2-VL3-L3-VH3-L4-VH2-L5-VH1-L6-CH1-L7-CL; VL1-L1-VL2-L2-VL3-L3-VH3-L4-VH2-L5-VH1-CL-CH1; VL1-L1-VL2-L2-VL3-L3-VH3-L4-VH2-L5-VH1-L6-CL-CH1; VL1-L1-VL2-L2-VL3-L3-VH3-L4-VH2-L5-VH1-L6-CL-L7-CH1; VH1-L1-VH2-L2-VH3-L3-VL3-L4-VL2-L5-VL1-CH1; VH1-L1-VH2-L2-VH3-L3-VL3-L4-VL2-L5-VL1-L6-CH1; VH1-L1-VH2-L2-VH3-L3-VL3-L4-VL2-L5-VL1-CL; VH1-L1-VH2-L2-VH3-L3-VL3-L4-VL2-L5-VL1-L6-CL; VH1-L1-VH2-L2-VH3-L3-VL3-L4-VL2-L5-VL1-CH1-CL; VH1-L1-VH2-L2-VH3-L3-VL3-L4-VL2-L5-VL1-L6-CH1-CL; VH1-L1-VH2-L2-VH3-L3-VL3-L4-VL2-L5-VL1-L6-CH1-L7-CL; VH1-L1-VH2-L2-VH3-L3-VL3-L4-VL2-L5-VL1-CL-CH1; VH1-L1-VH2-L2-VH3-L3-VL3-L4-VL2-L5-VL1-L6-CL-CH1; VH1-L1-VH2-L2-VH3-L3-VL3-L4-VL2-L5-VL1-L6-CL-L7-CH1; VL1-L1-VH2-L2-VL3-L3-VH3-L4-VL2-L5-VH1-CH1; VL1-L1-VH2-L2-VL3-L3-VH3-L4-VL2-L5-VH1-L6-CH1; VL1-L1-VH2-L2-VL3-L3-VH3-L4-VL2-L5-VH1-CL; VL1-L1-VH2-L2-VL3-L3-VH3-L4-VL2-L5-VH1-L6-CL; VL1-L1-VH2-L2-VL3-L3-VH3-L4-VL2-L5-VH1-CH1-CL; VL1-L1-VH2-L2-VL3-L3-VH3-L4-VL2-L5-VH1-L6-CH1-CL; VL1-L1-VH2-L2-VL3-L3-VH3-L4-VL2-L5-VH1-L6-CH1-L7-CL; VL1-L1-VH2-L2-VL3-L3-VH3-L4-VL2-L5-VH1-CL-CH1; VL1-L1-VH2-L2-VL3-L3-VH3-L4-VL2-L5-VH1-L6-CL-CH1; VL1-L1-VH2-L2-VL3-L3-VH3-L4-VL2-L5-VH1-L6-CL-L7-CH1; VH1-L1-VL2-L2-VH3-L3-VL3-L4-VH2-L5-VL1-CH1; VH1-L1-VL2-L2-VH3-L3-VL3-L4-VH2-L5-VL1-L6-CH1; VH1-L1-VL2-L2-VH3-L3-VL3-L4-VH2-L5-VL1-CL; VH1-L1-VL2-L2-VH3-L3-VL3-L4-VH2-L5-VL1-L6-CL; VH1-L1-VL2-L2-VH3-L3-VL3-L4-VH2-L5-VL1-CH1-CL; VH1-L1-VL2-L2-VH3-L3-VL3-L4-VH2-L5-VL1-L6-CH1-CL; VH1-L1-VL2-L2-VH3-L3-VL3-L4-VH2-L5-VL1-L6-CH1-L7-CL; VH1-L1-VL2-L2-VH3-L3-VL3-L4-VH2-L5-VL1-CL-CH1; VH1-L1-VL2-L2-VH3-L3-VL3-L4-VH2-L5-VL1-L6-CL-CH1; VH1-L1-VL2-L2-VH3-L3-VL3-L4-VH2-L5-VL1-L6-CL-L7-CH1; VL1-L1-VL2-L2-VH3-L3-VL3-L4-VH2-L5-VH1-CH1; VL1-L1-VL2-L2-VH3-L3-VL3-L4-VH2-L5-VH1-L6-CH1; VL1-L1-VL2-L2-VH3-L3-VL3-L4-VH2-L5-VH1-CL; VL1-L1-VL2-L2-VH3-L3-VL3-L4-VH2-L5-VH1-L6-CL; VL1-L1-VL2-L2-VH3-L3-VL3-L4-VH2-L5-VH1-CH1-CL; VL1-L1-VL2-L2-VH3-L3-VL3-L4-VH2-L5-VH1-L6-CH1-CL; VL1-L1-VL2-L2-VH3-L3-VL3-L4-VH2-L5-VH1-L6-CH1-L7-CL; VL1-L1-VL2-L2-VH3-L3-VL3-L4-VH2-L5-VH1-CL-CH1; VL1-L1-VL2-L2-VH3-L3-VL3-L4-VH2-L5-VH1-L6-CL-CH1; VL1-L1-VL2-L2-VH3-L3-VL3-L4-VH2-L5-VH1-L6-CL-L7-CH1; VH1-L1-VH2-L2-VL3-L3-VH3-L4-VL2-L5-VL1-CH1; VH1-L1-VH2-L2-VL3-L3-VH3-L4-VL2-L5-VL1-L6-CH1; VH1-L1-VH2-L2-VL3-L3-VH3-L4-VL2-L5-VL1-CL; VH1-L1-VH2-L2-VL3-L3-VH3-L4-VL2-L5-VL1-L6-CL; VH1-L1-VH2-L2-VL3-L3-VH3-L4-VL2-L5-VL1-CH1-CL; VH1-L1-VH2-L2-VL3-L3-VH3-L4-VL2-L5-VL1-L6-CH1-CL; VH1-L1-VH2-L2-VL3-L3-VH3-L4-VL2-L5-VL1-L6-CH1-L7-CL; VH1-L1-VH2-L2-VL3-L3-VH3-L4-VL2-L5-VL1-CL-CH1; VH1-L1-VH2-L2-VL3-L3-VH3-L4-VL2-L5-VL1-L6-CL-CH1; VH1-L1-VH2-L2-VL3-L3-VH3-L4-VL2-L5-VL1-L6-CL-L7-CH1; VL1-L1-VH2-L2-VH3-L3-VL3-L4-VL2-L5-VH1-CH1; VL1-L1-VH2-L2-VH3-L3-VL3-L4-VL2-L5-VH1-L6-CH1; VL1-L1-VH2-L2-VH3-L3-VL3-L4-VL2-L5-VH1-CL; VL1-L1-VH2-L2-VH3-L3-VL3-L4-VL2-L5-VH1-L6-CL; VL1-L1-VH2-L2-VH3-L3-VL3-L4-VL2-L5-VH1-CH1-CL; VL1-L1-VH2-L2-VH3-L3-VL3-L4-VL2-L5-VH1-L6-CH1-CL; VL1-L1-VH2-L2-VH3-L3-VL3-L4-VL2-L5-VH1-L6-CH1-L7-CL; VL1-L1-VH2-L2-VH3-L3-VL3-L4-VL2-L5-VH1-CL-CH1; VL1-L1-VH2-L2-VH3-L3-VL3-L4-VL2-L5-VH1-L6-CL-CH1; VL1-L1-VH2-L2-VH3-L3-VL3-L4-VL2-L5-VH1-L6-CL-L7-CH1; VH1-L1-VL2-L2-VL3-L3-VH3-L4-VH2-L5-VL1-CH1; VH1-L1-VL2-L2-VL3-L3-VH3-L4-VH2-L5-VL1-L6-CH1; VH1-L1-VL2-L2-VL3-L3-VH3-L4-VH2-L5-VL1-CL; VH1-L1-VL2-L2-VL3-L3-VH3-L4-VH2-L5-VL1-L6-CL; VH1-L1-VL2-L2-VL3-L3-VH3-L4-VH2-L5-VL1-CH1-CL; VH1-L1-VL2-L2-VL3-L3-VH3-L4-VH2-L5-VL1-L6-CH1-CL; VH1-L1-VL2-L2-VL3-L3-VH3-L4-VH2-L5-VL1-L6-CH1-L7-CL; VH1-L1-VL2-L2-VL3-L3-VH3-L4-VH2-L5-VL1-CL-CH1; VH1-L1-VL2-L2-VL3-L3-VH3-L4-VH2-L5-VL1-L6-CL-CH1; or VH1-L1-VL2-L2-VL3-L3-VH3-L4-VH2-L5-VL1-L6-CL-L7-CH1; wherein the second polypeptide has a structure represented by VL4-VH4-CH1; VL4-VH4-CL; VL4-VH4-CH1-CL; VL4-VH4-CL-CH1; VH4-VL4-CH1; VH4-VL4-CL; VH4-VL4-CH1-CL; VH4-VL4-CL-CH1; VL4-L8-VH4-CH1; VL4-L8-VH4-CL; VL4-L8-VH4-CH1-CL; VL4-L8-VH4-CL-CH1; VH4-L8-VL4-CH1; VH4-L8-VL4-CL; VH4-L8-VH4-CH1-CL; VH4-L8-VH4-CL-CH1; VL4-VL5-VH5-VH4-CH1; VL4-VL5-VH5-VH4-CL; VL4-VL5-VH5-VH4-CH1-CL; VL4-VL5-VH5-VH4-CL-CH1; VH4-VH5-VL5-VL4-CH1; VH4-VH5-VL5-VL4-CL; VH4-VH5-VL5-VL4-CH1-CL; VH4-VH5-VL5-VL4-CL-CH1; VL4-L8-VL5-L9-VH5-L10-VH4-CH1; VL4-L8-VL5-L9-VH5-L10-VH4-CL; VL4-L8-VL5-L9-VH5-L10-VH4-CH1-CL; VL4-L8-VL5-L9-VH5-L10-VH4-CL-CH1; VH4-L8-VH5-L9-VL5-L10-VL4-CH1; VH4-L8-VH5-L9-VL5-L10-VL4-CL; VH4-L8-VH5-L9-VL5-L10-VL4-CH1-CL; VH4-L8-VH5-L9-VL5-L10-VL4-CL-CH1; VL4-VL5-VL6-VH6-VH5-VH4-CH1; VL4-VL5-VL6-VH6-VH5-VH4-CL; VL4-VL5-VL6-VH6-VH5-VH4-CH1-CL; VL4-VL5-VL6-VH6-VH5-VH4-CL-CH1; VH4-VH5-VH6-VL6-VL5-VL4-CH1; VH4-VH5-VH6-VL6-VL5-VL4-CL; VH4-VH5-VH6-VL6-VL5-VL4-CH1-CL; VH4-VH5-VH6-VL6-VL5-VL4-CL-CH1; VL4-VH5-VL6-VH6-VL5-VH4-CH1; VL4-VH5-VL6-VH6-VL5-VH4-CL; VL4-VH5-VL6-VH6-VL5-VH4-CH1-CL; VL4-VH5-VL6-VH6-VL5-VH4-CL-CH1; VH4-VL5-VH6-VL6-VH5-VL4-CH1; VH4-VL5-VH6-VL6-VH5-VL4-CL; VH4-VL5-VH6-VL6-VH5-VL4-CH1-CL; VH4-VL5-VH6-VL6-VH5-VL4-CL-CH1; VL4-VL5-VH6-VL6-VH5-VH4-CH1; VL4-VL5-VH6-VL6-VH5-VH4-CL; VL4-VL5-VH6-VL6-VH5-VH4-CH1-CL; VL4-VL5-VH6-VL6-VH5-VH4-CL-CH1; VH4-VH5-VL6-VH6-VL5-VL4-CH1; VH4-VH5-VL6-VH6-VL5-VL4-CL; VH4-VH5-VL6-VH6-VL5-VL4-CH1-CL; VH4-VH5-VL6-VH6-VL5-VL4-CL-CH1; VL4-VH5-VH6-VL6-VL5-VH4-CH1; VL4-VH5-VH6-VL6-VL5-VH4-CL; VL4-VH5-VH6-VL6-VL5-VH4-CH1-CL; VL4-VH5-VH6-VL6-VL5-VH4-CL-CH1; VH4-VL5-VL6-VH6-VH5-VL4-CH1; VH4-VL5-VL6-VH6-VH5-VL4-CL; VH4-VL5-VL6-VH6-VH5-VL4-CH1-CL; VH4-VL5-VL6-VH6-VH5-VL4-CL-CH1; VL4-L8-VL5-L9-VL6-L10-VH6-L11-VH5-L12-VH4-CH1; VL4-L8-VL5-L9-VL6-L10-VH6-L11-VH5-L12-VH4-CL; VL4-L8-VL5-L9-VL6-L10-VH6-L11-VH5-L12-VH4-CH1-CL; VL4-L8-VL5-L9-VL6-L10-VH6-L11-VH5-L12-VH4-CL-CH1; VH4-L8-VH5-L9-VH6-L10-VL6-L11-VL5-L12-VL4-CH1; VH4-L8-VH5-L9-VH6-L10-VL6-L11-VL5-L12-VL4-CL; VH4-L8-VH5-L9-VH6-L10-VL6-L11-VL5-L12-VL4-CH1-CL; VH4-L8-VH5-L9-VH6-L10-VL6-L11-VL5-L12-VL4-CL-CH1; VL4-L8-VH5-L9-VL6-L10-VH6-L11-VL5-L12-VH4-CH1; VL4-L8-VH5-L9-VL6-L10-VH6-L11-VL5-L12-VH4-CL; VL4-L8-VH5-L9-VL6-L10-VH6-L11-VL5-L12-VH4-CH1-CL; VL4-L8-VH5-L9-VL6-L10-VH6-L11-VL5-L12-VH4-CL-CH1; VH4-L8-VL5-L9-VH6-L10-VL6-L11-VH5-L12-VL4-CH1; VH4-L8-VL5-L9-VH6-L10-VL6-L11-VH5-L12-VL4-CL; VH4-L8-VL5-L9-VH6-L10-VL6-L11-VH5-L12-VL4-CH1-CL; VH4-L8-VL5-L9-VH6-L10-VL6-L11-VH5-L12-VL4-CL-CH1; VL4-L8-VL5-L9-VH6-L10-VL6-L11-VH5-L12-VH4-CH1; VL4-L8-VL5-L9-VH6-L10-VL6-L11-VH5-L12-VH4-CL; VL4-L8-VL5-L9-VH6-L10-VL6-L11-VH5-L12-VH4-CH1-CL; VL4-L8-VL5-L9-VH6-L10-VL6-L11-VH5-L12-VH4-CL-CH1; VH4-L8-VH5-L9-VL6-L10-VH6-L11-VL5-L12-VL4-CH1; VH4-L8-VH5-L9-VL6-L10-VH6-L11-VL5-L12-VL4-CL; VH4-L8-VH5-L9-VL6-L10-VH6-L11-VL5-L12-VL4-CH1-CL; VH4-L8-VH5-L9-VL6-L10-VH6-L11-VL5-L12-VL4-CL-CH1; VL4-L8-VH5-L9-VH6-L10-VL6-L11-VL5-L12-VH4-CH1; VL4-L8-VH5-L9-VH6-L10-VL6-L11-VL5-L12-VH4-CL; VL4-L8-VH5-L9-VH6-L10-VL6-L11-VL5-L12-VH4-CH1-CL; VL4-L8-VH5-L9-VH6-L10-VL6-L11-VL5-L12-VH4-CL-CH1; VH4-L8-VL5-L9-VL6-L10-VH6-L11-VH5-L12-VL4-CH1; VH4-L8-VL5-L9-VL6-L10-VH6-L11-VH5-L12-VL4-CL; VH4-L8-VL5-L9-VL6-L10-VH6-L11-VH5-L12-VL4-CH1-CL; VH4-L8-VL5-L9-VL6-L10-VH6-L11-VH5-L12-VL4-CL-CH1; VL4-L8-VL5-L9-VL6-L10-VH6-L11-VH5-L12-VH4-CL-CH1; VL4-L8-VL5-L9-VL6-L10-VH6-L11-VH5-L12-VH4-L13-CL; VL4-L8-VL5-L9-VL6-L10-VH6-L11-VH5-L12-VH4-L13-CH1-CL; VL4-L8-VL5-L9-VL6-L10-VH6-L11-VH5-L12-VH4-L13-CL-CH1; VH4-L8-VH5-L9-VH6-L10-VL6-L11-VL5-L12-VL4-L13-CH1; VH4-L8-VH5-L9-VH6-L10-VL6-L11-VL5-L12-VL4-L13-CL; VH4-L8-VH5-L9-VH6-L10-VL6-L11-VL5-L12-VL4-L13-CH1-CL; VH4-L8-VH5-L9-VH6-L10-VL6-L11-VL5-L12-VL4-L13-CL-CH1; VL4-L8-VH5-L9-VL6-L10-VH6-L11-VL5-L12-VH4-L13-CH1; VL4-L8-VH5-L9-VL6-L10-VH6-L11-VL5-L12-VH4-L13-CL; VL4-L8-VH5-L9-VL6-L10-VH6-L11-VL5-L12-VH4-L13-CH1-CL; VL4-L8-VH5-L9-VL6-L10-VH6-L11-VL5-L12-VH4-L13-CL-CH1; VH4-L8-VL5-L9-VH6-L10-VL6-L11-VH5-L12-VL4-L13-CH1; VH4-L8-VL5-L9-VH6-L10-VL6-L11-VH5-L12-VL4-L13-CL; VH4-L8-VL5-L9-VH6-L10-VL6-L11-VH5-L12-VL4-L13-CH1-CL; VH4-L8-VL5-L9-VH6-L10-VL6-L11-VH5-L12-VL4-L13-CL-CH1; VL4-L8-VL5-L9-VH6-L10-VL6-L11-VH5-L12-VH4-L13-CH1; VL4-L8-VL5-L9-VH6-L10-VL6-L11-VH5-L12-VH4-L13-CL; VL4-L8-VL5-L9-VH6-L10-VL6-L11-VH5-L12-VH4-L13-CH1-CL; VL4-L8-VL5-L9-VH6-L10-VL6-L11-VH5-L12-VH4-L13-CL-CH1; VH4-L8-VH5-L9-VL6-L10-VH6-L11-VL5-L12-VL4-L13-CH1; VH4-L8-VH5-L9-VL6-L10-VH6-L11-VL5-L12-VL4-L13-CL; VH4-L8-VH5-L9-VL6-L10-VH6-L11-VL5-L12-VL4-L13-CH1-CL; VH4-L8-VH5-L9-VL6-L10-VH6-L11-VL5-L12-VL4-L13-CL-CH1; VL4-L8-VH5-L9-VH6-L10-VL6-L11-VL5-L12-VH4-L13-CH1; VL4-L8-VH5-L9-VH6-L10-VL6-L11-VL5-L12-VH4-L13-CL; VL4-L8-VH5-L9-VH6-L10-VL6-L11-VL5-L12-VH4-L13-CH1-CL; VL4-L8-VH5-L9-VH6-L10-VL6-L11-VL5-L12-VH4-L13-CH1; VH4-L8-VL5-L9-VL6-L10-VH6-L11-VH5-L12-VL4-L13-CH1; VH4-L8-VL5-L9-VL6-L10-VH6-L11-VH5-L12-VL4-L13-CL; VH4-L8-VL5-L9-VL6-L10-VH6-L11-VH5-L12-VL4-L13-CH1-CL; or VH4-L8-VL5-L9-VL6-L10-VH6-L11-VH5-L12-VL4-L13-CL-CH1; wherein VL1 is a first immunoglobulin light chain variable region; VL2 is a second immunoglobulin light chain variable region; VL3 is a third immunoglobulin light chain variable region; VL4 is a fourth immunoglobulin light chain variable region; VL5 is a fifth immunoglobulin light chain variable region; VL6 is a sixth immunoglobulin light chain variable region; VH1 is a first immunoglobulin heavy chain variable region; VH2 is a second immunoglobulin heavy chain variable region; VH3 is a third immunoglobulin heavy chain variable region; VH4 is a fourth immunoglobulin heavy chain variable region; VH5 is a fifth immunoglobulin heavy chain variable region; VH6 is a sixth immunoglobulin heavy chain variable region; CH1 is a heavy chain constant region 1; CL is a light chain constant region; and L1, L2, L3, L4, L5, L6, L7, L8, L9, L10, L11, L12 and L13 are amino acid linkers. Any combination of VH1, VH2, VH3 and/or VH4 described above may be used in combination with any combination of VL1, VL2, VL3 and/or VL4 described above. Thus, any first polypeptide described above may be used in any combination with any second polypeptide described above.

[0826] In some aspects, an antigen binding polypeptide complex provided herein comprises a first polypeptide and a second polypeptide; wherein the first polypeptide has a structure represented by VL1-VL2-VL3-VH3-VH2-VH1-CH1-Fc; VH1-VH2-VH3-VL3-VL2-VL1-CH1-Fc; VL1-VH2-VL3-VH3-VL2-VH1-CH1-Fc; VH1-VL2-VH3-VL3-VH2-VL1-CH1-Fc; VL1-VL2-VH3-VL3-VH2-VH1-CH1-Fc; VH1-VH2-VL3-VH3-VL2-VL1-CH1-Fc; VL1-VH2-VH3-VL3-VL2-VH1-CH1-Fc; VH1-VL2-VL3-VH3-VH2-VL1-CH1-Fc; VL1-VL2-VL3-VH3-VH2-VH1-CL-Fc; VH1-VH2-VH3-VL3-VL2-VL1-CL-Fc; VL1-VH2-VL3-VH3-VL2-VH1-CL-Fc; VH1-VL2-VH3-VL3-VH2-VL1-CL-Fc; VL1-VL2-VH3-VL3-VH2-VH1-CL-Fc; VH1-VH2-VL3-VH3-VL2-VL1-CL-Fc; VL1-VH2-VH3-VL3-VL2-VH1-CL-Fc; VH1-VL2-VL3-VH3-VH2-VL1-CL-Fc; VL1-VL2-VL3-VH3-VH2-VH1-CH1-CL-Fc; VH1-VH2-VH3-VL3-VL2-VL1-CH1-CL-Fc; VL1-VH2-VL3-VH3-VL2-VH1-CH1-CL-Fc; VH1-VL2-VH3-VL3-VH2-VL1-CH1-CL-Fc; VL1-VL2-VH3-VL3-VH2-VH1-CH1-CL-Fc; VH1-VH2-VL3-VH3-VL2-VL1-CH1-CL-Fc; VL1-VH2-VH3-VL3-VL2-VH1-CH1-CL-Fc; VH1-VL2-VL3-VH3-VH2-VL1-CH1-CL-Fc; VL1-VL2-VL3-VH3-VH2-VH1-CL-CH1-Fc; VH1-VH2-VH3-VL3-VL2-VL1-CL-CH1-Fc; VL1-VH2-VL3-VH3-VL2-VH1-CL-CH1-Fc; VH1-VL2-VH3-VL3-VH2-VL1-CL-CH1-Fc; VL1-VL2-VH3-VL3-VH2-VH1-CL-CH1-Fc; VH1-VH2-VL3-VH3-VL2-VL1-CL-CH1-Fc; VL1-VH2-VH3-VL3-VL2-VH1-CL-CH1-Fc; VH1-VL2-VL3-VH3-VH2-VL1-CL-CH1-Fc; VL1-L1-VL2-L2-VL3-L3-VH3-L4-VH2-L5-VH1-CH1-Fc; VH1-L1-VH2-L2-VH3-L3-VL3-L4-VL2-L5-VL1-CH1-Fc; VL1-L1-VH2-L2-VL3-L3-VH3-L4-VL2-L5-VH1-CH1-Fc; VH1-L1-VL2-L2-VH3-L3-VL3-L4-VH2-L5-VL1-CH1-Fc; VL1-L1-VL2-L2-VH3-L3-VL3-L4-VH2-L5-VH1-CH1-Fc; VH1-L1-VH2-L2-VL3-L3-VH3-L4-VL2-L5-VL1-CH1-Fc; VL1-L1-VH2-L2-VH3-L3-VL3-L4-VL2-L5-VH1-CH1-Fc; VH1-L1-VL2-L2-VL3-L3-VH3-L4-VH2-L5-VL1-CH1-Fc; VL1-L1-VL2-L2-VL3-L3-VH3-L4-VH2-L5-VH1-CL-Fc; VH1-L1-VH2-L2-VH3-L3-VL3-L4-VL2-L5-VL1-CL-Fc; VL1-L1-VH2-L2-VL3-L3-VH3-L4-VL2-L5-VH1-CL-Fc; VH1-L1-VL2-L2-VH3-L3-VL3-L4-VH2-L5-VL1-CL-Fc; VL1-L1-VL2-L2-VH3-L3-VL3-L4-VH2-L5-VH1-CL-Fc; VH1-L1-VH2-L2-VL3-L3-VH3-L4-VL2-L5-VL1-CL-Fc; VL1-L1-VH2-L2-VH3-L3-VL3-L4-VL2-L5-VH1-CL-Fc; VH1-L1-VL2-L2-VL3-L3-VH3-L4-VH2-L5-VL1-CL-Fc; VL1-L1-VL2-L2-VL3-L3-VH3-L4-VH2-L5-VH1-CH1-CL-Fc; VH1-L1-VH2-L2-VH3-L3-VL3-L4-VL2-L5-VL1-CH1-CL-Fc; VL1-L1-VH2-L2-VL3-L3-VH3-L4-VL2-L5-VH1-CH1-CL-Fc; VH1-L1-VL2-L2-VH3-L3-VL3-L4-VH2-L5-VL1-CH1-CL-Fc; VL1-L1-VL2-L2-VH3-L3-VL3-L4-VH2-L5-VH1-CH1-CL-Fc; VH1-L1-VH2-L2-VL3-L3-VH3-L4-VL2-L5-VL1-CH1-CL-Fc; VL1-L1-VH2-L2-VH3-L3-VL3-L4-VL2-L5-VH1-CH1-CL-Fc; VH1-L1-VL2-L2-VL3-L3-VH3-L4-VH2-L5-VL1-CH1-CL-Fc; VL1-L1-VL2-L2-VL3-L3-VH3-L4-VH2-L5-VH1-CL-CH1-Fc; VH1-L1-VH2-L2-VH3-L3-VL3-L4-VL2-L5-VL1-CL-CH1-Fc; VL1-L1-VH2-L2-VL3-L3-VH3-L4-VL2-L5-VH1-CL-CH1-Fc; VH1-L1-VL2-L2-VH3-L3-VL3-L4-VH2-L5-VL1-CL-CH1-Fc; VL1-L1-VL2-L2-VH3-L3-VL3-L4-VH2-L5-VH1-CL-CH1-Fc; VH1-L1-VH2-L2-VL3-L3-VH3-L4-VL2-L5-VL1-CL-CH1-Fc; VL1-L1-VH2-L2-VH3-L3-VL3-L4-VL2-L5-VH1-CL-CH1-Fc; or VH1-L1-VL2-L2-VL3-L3-VH3-L4-VH2-L5-VL1-CL-CH1-Fc; wherein the second polypeptide has a structure represented by Fc; VL4-VH4-CH1-Fc; VL4-VH4-CL-Fc; VL4-VH4-CH1-CL-Fc; VL4-VH4-CL-CH1-Fc; VH4-VL4-CH1-Fc; VH4-VL4-CL-Fc; VH4-VL4-CH1-CL-Fc; VH4-VL4-CL-CH1-Fc; VL4-L6-VH4-CH1-Fc; VL4-L6-VH4-CL-Fc; VL4-L6-VH4-CH1-CL-Fc; VL4-L6-VH4-CL-CH1-Fc; VH4-L6-VL4-CH1-Fc; VH4-L6-VL4-CL-Fc; VH4-L6-VL4-CH1-CL-Fc; VH4-L6-VL4-CL-CH1-Fc; VL4-CL-VH4-CH1-Fc; VH4-CL-VL4-CH1-Fc; VL4-CH1-VH4-CL-Fc; VH4-CH1-VL4-CL-Fc; VL4-L6-CL-L7-VH4-L8-CH1-Fc; VL4-L6-CL-L7-VH4-L8-CH1-L9-Fc; VH4-L6-CL-L7-VL4-L8-CH1-Fc; VH4-L6-CL-L7-VL4-L8-CH1-L9-Fc; VL4-L6-CH1-L7-VH4-L8-CL-Fc; VL4-L6-CH1-L7-VH4-L8-CL-L9-Fc; VH4-L6-CH1-L7-VL4-L8-CL-Fc; VH4-L6-CH1-L7-VL4-L8-CL-L9-Fc; VL4-VL5-VH5-VH4-CH1-Fc; VL4-VL5-VH5-VH4-CL-Fc; VL4-VL5-VH5-VH4-CH1-CL-Fc; VL4-VL5-VH5-VH4-CL-CH1-Fc; VH4-VH5-VL5-VL4-CH1-Fc; VH4-VH5-VL5-VL4-CL-Fc; VH4-VH5-VL5-VL4-CH1-CL-Fc; VH4-VH5-VL5-VL4-CL-CH1-Fc; VL4-L6-VL5-L7-VH5-L8-VH4-CH1-Fc; VL4-L6-VL5-L7-VH5-L8-VH4-CL-Fc; VL4-L6-VL5-L7-VH5-L8-VH4-CH1-CL-Fc; VL4-L6-VL5-L7-VH5-L8-VH4-CL-CH1-Fc; VH4-L6-VH5-L7-VL5-L8-VL4-CH1-Fc; VH4-L6-VH5-L7-VL5-L8-VL4-CL-Fc; VH4-L6-VH5-L7-VL5-L8-VL4-CH1-CL-Fc; VH4-L6-VH5-L7-VL5-L8-VL4-CL-CH1-Fc; VL4-VL5-VL6-VH6-VH5-VH4-CH1-Fc; VL4-VL5-VL6-VH6-VH5-VH4-CL-Fc; VL4-VL5-VL6-VH6-VH5-VH4-CH1-CL-Fe; VL4-VL5-VL6-VH6-VH5-VH4-CL-CH1-Fe; VH4-VH5-VH6-VL6-VL5-VL4-CH1-Fc; VH4-VH5-VH6-VL6-VL5-VL4-CL-Fc; VH4-VH5-VH6-VL6-VL5-VL4-CH1-CL-Fc; VH4-VH5-VH6-VL6-VL5-VL4-CL-CH1-Fc; VL4-VH5-VL6-VH6-VL5-VH4-CH1-Fc; VL4-VH5-VL6-VH6-VL5-VH4-CL-Fc; VL4-VH5-VL6-VH6-VL5-VH4-CH1-CL-Fc; VL4-VH5-VL6-VH6-VL5-VH4-CL-CH1-Fc; VH4-VL5-VH6-VL6-VH5-VL4-CH1-Fc; VH4-VL5-VH6-VL6-VH5-VL4-CL-Fc; VH4-VL5-VH6-VL6-VH5-VL4-CH1-CL-Fc; VH4-VL5-VH6-VL6-VH5-VL4-CL-CH1-Fc; VL4-VL5-VH6-VL6-VH5-VH4-CH1-Fc; VL4-VL5-VH6-VL6-VH5-VH4-CL-Fc; VL4-VL5-VH6-VL6-VH5-VH4-CH1-CL-Fc; VL4-VL5-VH6-VL6-VH5-VH4-CL-CH1-Fc; VH4-VH5-VL6-VH6-VL5-VL4-CH1-Fc; VH4-VH5-VL6-VH6-VL5-VL4-CL-Fc; VH4-VH5-VL6-VH6-VL5-VL4-CH1-CL-Fc; VH4-VH5-VL6-VH6-VL5-VL4-CL-CH1-Fc; VL4-VH5-VH6-VL6-VL5-VH4-CH1-Fc; VL4-VH5-VH6-VL6-VL5-VH4-CL-Fc; VL4-VH5-VH6-VL6-VL5-VH4-CH1-CL-Fc; VL4-VH5-VH6-VL6-VL5-VH4-CL-CH1-Fc; VH4-VL5-VL6-VH6-VH5-VL4-CH1-Fc; VH4-VL5-VL6-VH6-VH5-VL4-CL-Fc; VH4-VL5-VL6-VH6-VH5-VL4-CH1-CL-Fc; VH4-VL5-VL6-VH6-VH5-VL4-CL-CH1-Fc; VL4-L6-VL5-L7-VL6-L8-VH6-L9-VH5-L10-VH4-CH1-Fc; VL4-L6-VL5-L7-VL6-L8-VH6-L9-VH5-L10-VH4-CL-Fc; VL4-L6-VL5-L7-VL6-L8-VH6-L9-VH5-L10-VH4-CH1-CL-Fc; VL4-L6-VL5-L7-VL6-L8-VH6-L9-VH5-L10-VH4-CL-CH1-Fc; VH4-L6-VH5-L7-VH6-L8-VL6-L9-VL5-L10-VL4-CH1-Fc; VH4-L6-VH5-L7-VH6-L8-VL6-L9-VL5-L10-VL4-CL-Fc; VH4-L6-VH5-L7-VH6-L8-VL6-L9-VL5-L10-VL4-CH1-CL-Fc; VH4-L6-VH5-L7-VH6-L8-VL6-L9-VL5-L10-VL4-CL-CH1-Fc; VL4-L6-VH5-L7-VL6-L8-VH6-L9-VL5-L10-VH4-CH1-Fc; VL4-L6-VH5-L7-VL6-L8-VH6-L9-VL5-L10-VH4-CL-Fc; VL4-L6-VH5-L7-VL6-L8-VH6-L9-VL5-L10-VH4-CH1-CL-Fc; VL4-L6-VH5-L7-VL6-L8-VH6-L9-VL5-L10-VH4-CL-CH1-Fc; VH4-L6-VL5-L7-VH6-L8-VL6-L9-VH5-L10-VL4-CH1-Fc; VH4-L6-VL5-L7-VH6-L8-VL6-L9-VH5-L10-VL4-CL-Fc; VH4-L6-VL5-L7-VH6-L8-VL6-L9-VH5-L10-VL4-CH1-CL-Fc; VH4-L6-VL5-L7-VH6-L8-VL6-L9-VH5-L10-VL4-CL-CH1-Fc; VL4-L6-VL5-L7-VH6-L8-VL6-L9-VH5-L10-VH4-CH1-Fc; VL4-L6-VL5-L7-VH6-L8-VL6-L9-VH5-L10-VH4-CL-Fc; VL4-L6-VL5-L7-VH6-L8-VL6-L9-VH5-L10-VH4-CH1-CL-Fc; VL4-L6-VL5-L7-VH6-L8-VL6-L9-VH5-L10-VH4-CL-CH1-Fc; VH4-L6-VH5-L7-VL6-L8-VH6-L9-VL5-L10-VL4-CH1-Fc; VH4-L6-VH5-L7-VL6-L8-VH6-L9-VL5-L10-VL4-CL-Fc; VH4-L6-VH5-L7-VL6-L8-VH6-L9-VL5-L10-VL4-CH1-CL-Fc; VH4-L6-VH5-L7-VL6-L8-VH6-L9-VL5-L10-VL4-CL-CH1-Fc; VL4-L6-VH5-L7-VH6-L8-VL6-L9-VL5-L10-VH4-CH1-Fc; VL4-L6-VH5-L7-VH6-L8-VL6-L9-VL5-L10-VH4-CL-Fe; VL4-L6-VH5-L7-VH6-L8-VL6-L9-VL5-L10-VH4-CH1-CL-Fc; VL4-L6-VH5-L7-VH6-L8-VL6-L9-VL5-L10-VH4-CL-CH1-Fc; VH4-L6-VL5-L7-VL6-L8-VH6-L9-VH5-L10-VL4-CH1-Fc; VH4-L6-VL5-L7-VL6-L8-VH6-L9-VH5-L10-VL4-CL-Fc; VH4-L6-VL5-L7-VL6-L8-VH6-L9-VH5-L10-VL4-CH1-CL-Fc; VH4-L6-VL5-L7-VL6-L8-VH6-L9-VH5-L10-VL4-CL-CH1-Fc; VL4-L6-VL5-L7-VL6-L8-VH6-L9-VH5-L10-VH4-L11-CH1-Fc; VL4-L6-VL5-L7-VL6-L8-VH6-L9-VH5-L10-VH4-L11-CL-Fc; VL4-L6-VL5-L7-VL6-L8-VH6-L9-VH5-L10-VH4-L11-CH1-CL-Fc; VL4-L6-VL5-L7-VL6-L8-VH6-L9-VH5-L10-VH4-L11-CL-CH1-Fc; VH4-L6-VH5-L7-VH6-L8-VL6-L9-VL5-L10-VL4-L11-CH1-Fc; VH4-L6-VH5-L7-VH6-L8-VL6-L9-VL5-L10-VL4-L11-CL-Fc; VH4-L6-VH5-L7-VH6-L8-VL6-L9-VL5-L10-VL4-L11-CH1-CL-Fc; VH4-L6-VH5-L7-VH6-L8-VL6-L9-VL5-L10-VL4-L11-CL-CH1-Fc; VL4-L6-VH5-L7-VL6-L8-VH6-L9-VL5-L10-VH4-L11-CH1-Fc; VL4-L6-VH5-L7-VL6-L8-VH6-L9-VL5-L10-VH4-L11-CL-Fc; VL4-L6-VH5-L7-VL6-L8-VH6-L9-VL5-L10-VH4-L11-CH1-CL-Fc; VL4-L6-VH5-L7-VL6-L8-VH6-L9-VL5-L10-VH4-L11-CL-CH1-Fc; VH4-L6-VL5-L7-VH6-L8-VL6-L9-VH5-L10-VL4-L11-CH1-Fc; VH4-L6-VL5-L7-VH6-L8-VL6-L9-VH5-L10-VL4-L11-CL-Fc; VH4-L6-VL5-L7-VH6-L8-VL6-L9-VH5-L10-VL4-L11-CH1-CL-Fc; VH4-L6-VL5-L7-VH6-L8-VL6-L9-VH5-L10-VL4-L11-CL-CH1-Fc; VL4-L6-VL5-L7-VH6-L8-VL6-L9-VH5-L10-VH4-L11-CH1-Fc; VL4-L6-VL5-L7-VH6-L8-VL6-L9-VH5-L10-VH4-L11-CL-Fc; VL4-L6-VL5-L7-VH6-L8-VL6-L9-VH5-L10-VH4-L11-CH1-CL-Fc; VL4-L6-VL5-L7-VH6-L8-VL6-L9-VH5-L10-VH4-L11-CL-CH1-Fc; VH4-L6-VH5-L7-VL6-L8-VH6-L9-VL5-L10-VL4-L11-CH1-Fc; VH4-L6-VH5-L7-VL6-L8-VH6-L9-VL5-L10-VL4-L11-CL-Fc; VH4-L6-VH5-L7-VL6-L8-VH6-L9-VL5-L10-VL4-L11-CH1-CL-Fc; VH4-L6-VH5-L7-VL6-L8-VH6-L9-VL5-L10-VL4-L11-CL-CH1-Fc; VL4-L6-VH5-L7-VH6-L8-VL6-L9-VL5-L10-VH4-L11-CH1-Fc; VL4-L6-VH5-L7-VH6-L8-VL6-L9-VL5-L10-VH4-L11-CL-Fc; VL4-L6-VH5-L7-VH6-L8-VL6-L9-VL5-L10-VH4-L11-CH1-CL-Fc; VL4-L6-VH5-L7-VH6-L8-VL6-L9-VL5-L10-VH4-L11-CL-CH1-Fc; VH4-L6-VL5-L7-VL6-L8-VH6-L9-VH5-L10-VL4-L11-CH1-Fc; VH4-L6-VL5-L7-VL6-L8-VH6-L9-VH5-L10-VL4-L11-CL-Fc; VH4-L6-VL5-L7-VL6-L8-VH6-L9-VH5-L10-VL4-L11-CH1-CL-Fc; or VH4-L6-VL5-L7-VL6-L8-VH6-L9-VH5-L10-VL4-L11-CL-CH1-Fc; wherein VL1 is a first immunoglobulin light chain variable region; VL2 is a second immunoglobulin light chain variable region; VL3 is a third immunoglobulin light chain variable region; VL4 is a fourth immunoglobulin light chain variable region; VL5 is a fifth immunoglobulin light chain variable region; VL6 is a sixth immunoglobulin light chain variable region; VH1 is a first immunoglobulin heavy chain variable region; VH2 is a second immunoglobulin heavy chain variable region; VH3 is a third immunoglobulin heavy chain variable region; VH4 is a fourth immunoglobulin heavy chain variable region; VH5 is a fifth immunoglobulin heavy chain variable region; VH6 is a sixth immunoglobulin heavy chain variable region; Fc is a region comprising an immunoglobulin heavy chain constant region 2 (CH2), an immunoglobulin heavy chain constant region 3 (CH3), and optionally, an immunoglobulin hinge; CH1 is a heavy chain constant region 1; CL is a light chain constant region; and L1, L2, L3, L4, L5, L6, L7, L8, L9, L10 and L11 are amino acid linkers. Any combination of VH1, VH2, VH3 and/or VH4 described above may be used in combination with any combination of VL1, VL2, VL3 and/or VL4 described above. Thus, any first polypeptide described above may be used in any combination with any second polypeptide described above.

[0827] In some aspects, antigen binding polypeptide provided herein has a structure represented by VL1-VL2-VL3-VH3-VH2-VH1-CH3-CH3; VH1-VH2-VH3-VL3-VL2-VL1-CH3-CH3; VL1-VH2-VL3-VH3-VL2-VH1-CH3-CH3; VH1-VL2-VH3-VL3-VH2-VL1-CH3-CH3; VL1-VL2-VH3-VL3-VH2-VH1-CH3-CH3; VH1-VH2-VL3-VH3-VL2-VL1-CH3-CH3; VL1-VH2-VH3-VL3-VL2-VH1-CH3-CH3; VH1-VL2-VL3-VH3-VH2-VL1-CH3-CH3; VL1-L1-VL2-L2-VL3-L3-VH3-L4-VH2-L5-VH1-CH3-CH3; VH1-L1-VH2-L2-VH3-L3-VL3-L4-VL2-L5-VL1-CH3-CH3; VL1-L1-VH2-L2-VL3-L3-VH3-L4-VL2-L5-VH1-CH3-CH3; VH1-L1-VL2-L2-VH3-L3-VL3-L4-VH2-L5-VL1-CH3-CH3; VL1-L1-VL2-L2-VH3-L3-VL3-L4-VH2-L5-VH1-CH3-CH3; VH1-L1-VH2-L2-VL3-L3-VH3-L4-VL2-L5-VL1-CH3-CH3; VL1-L1-VH2-L2-VH3-L3-VL3-L4-VL2-L5-VH1-CH3-CH3; VH1-L1-VL2-L2-VL3-L3-VH3-L4-VH2-L5-VL1-CH3-CH3; VL1-L1-VL2-L2-VL3-L3-VH3-L4-VH2-L5-VH1-L6-CH3-CH3; VH1-L1-VH2-L2-VH3-L3-VL3-L4-VL2-L5-VL1-L6-CH3-CH3; VL1-L1-VH2-L2-VL3-L3-VH3-L4-VL2-L5-VH1-L6-CH3-CH3; VH1-L1-VL2-L2-VH3-L3-VL3-L4-VH2-L5-VL1-L6-CH3-CH3; VL1-L1-VL2-L2-VH3-L3-VL3-L4-VH2-L5-VH1-L6-CH3-CH3; VH1-L1-VH2-L2-VL3-L3-VH3-L4-VL2-L5-VL1-L6-CH3-CH3; VL1-L1-VH2-L2-VH3-L3-VL3-L4-VL2-L5-VH1-L6-CH3-CH3; VH1-L1-VL2-L2-VL3-L3-VH3-L4-VH2-L5-VL1-L6-CH3-CH3; VL1-L1-VL2-L2-VL3-L3-VH3-L4-VH2-L5-VH1-L6-CH3-L7-CH3; VH1-L1-VH2-L2-VH3-L3-VL3-L4-VL2-L5-VL1-L6-CH3-L7-CH3; VL1-L1-VH2-L2-VL3-L3-VH3-L4-VL2-L5-VH1-L6-CH3-L7-CH3; VH1-L1-VL2-L2-VH3-L3-VL3-L4-VH2-L5-VL1-L6-CH3-L7-CH3; VL1-L1-VL2-L2-VH3-L3-VL3-L4-VH2-L5-VH1-L6-CH3-L7-CH3; VH1-L1-VH2-L2-VL3-L3-VH3-L4-VL2-L5-VL1-L6-CH3-L7-CH3; VL1-L1-VH2-L2-VH3-L3-VL3-L4-VL2-L5-VH1-L6-CH3-L7-CH3; or VH1-L1-VL2-L2-VL3-L3-VH3-L4-VH2-L5-VL1-L6-CH3-L7-CH3; wherein VL1 is a first immunoglobulin light chain variable region; VL2 is a second immunoglobulin light chain variable region; VL3 is a third immunoglobulin light chain variable region; VH1 is a first immunoglobulin heavy chain variable region; VH2 is a second immunoglobulin heavy chain variable region; VH3 is a third immunoglobulin heavy chain variable region; CH3 is an immunoglobulin heavy chain constant region 3; and L1, L2, L3, L4, L5, L6 and L7 are amino acid linkers.

[0828] In some aspects, an antigen binding polypeptide complex provided herein comprises a first polypeptide, a second polypeptide, and a third polypeptide; wherein the first polypeptide has a structure represented by VL1-VL2-VL3-VH3-VH2-VH1; VH1-VH2-VH3-VL3-VL2-VL1; VL1-VH2-VL3-VH3-VL2-VH1; VH1-VL2-VH3-VL3-VH2-VL1; VL1-VL2-VH3-VL3-VH2-VH1; VH1-VH2-VL3-VH3-VL2-VL1; VL1-VH2-VH3-VL3-VL2-VH1; VH1-VL2-VL3-VH3-VH2-VL1; VL1-L1-VL2-L2-VL3-L3-VH3-L4-VH2-L5-VH1; VH1-L1-VH2-L2-VH3-L3-VL3-L4-VL2-L5-VL1; VL1-L1-VH2-L2-VL3-L3-VH3-L4-VL2-L5-VH1; VH1-L1-VL2-L2-VH3-L3-VL3-L4-VH2-L5-VL1; VL1-L1-VL2-L2-VH3-L3-VL3-L4-VH2-L5-VH1; VH1-L1-VH2-L2-VL3-L3-VH3-L4-VL2-L5-VL1; VL1-L1-VH2-L2-VH3-L3-VL3-L4-VL2-L5-VH1; or VH1-L1-VL2-L2-VL3-L3-VH3-L4-VH2-L5-VL1; wherein the second polypeptide has a structure represented by VL4-VL5; VL4-L6-VL5; VL4-VL5-VL6; or VL4-L6-VL5-L7-VL6; wherein the third polypeptide has a structure represented by VH4-VH5; VH4-L6-VH5; VH4-VH5-VH6; or VH4-L6-VH5-L7-VH6; wherein VL1 is a first immunoglobulin light chain variable region; VL2 is a second immunoglobulin light chain variable region; VL3 is a third immunoglobulin light chain variable region; VL4 is a fourth immunoglobulin light chain variable region; VL5 is a fifth immunoglobulin light chain variable region; VL6 is a sixth immunoglobulin light chain variable region; VH1 is a first immunoglobulin heavy chain variable region; VH2 is a second immunoglobulin heavy chain variable region; VH3 is a third immunoglobulin heavy chain variable region; VH4 is a fourth immunoglobulin heavy chain variable region; VH5 is a fifth immunoglobulin heavy chain variable region; VH6 is a sixth immunoglobulin heavy chain variable region; and L1, L2, L3, L4, L5, L6 and L7 are amino acid linkers. Any combination of VH1, VH2, VH3, VH4, VH5 and/or VH6 described above may be used in combination with any combination of VL1, VL2, VL3, VL4, VL5 and/or VL6 described above. Thus, any first polypeptide described above may be used in any combination with any second polypeptide described above and any third polypeptide described above. The first, second and third polypeptides may be selected independently.

[0829] In some aspects, an antigen binding polypeptide complex provided herein comprises a first polypeptide, a second polypeptide, and a third polypeptide; wherein the first polypeptide has a structure represented by VL1-VL2-VL3-VH3-VH2-VH1-Fc; VH1-VH2-VH3-VL3-VL2-VL1-Fc; VL1-VH2-VL3-VH3-VL2-VH1-Fc; VH1-VL2-VH3-VL3-VH2-VL1-Fc; VL1-VL2-VH3-VL3-VH2-VH1-Fc; VH1-VH2-VL3-VH3-VL2-VL1-Fc; VL1-VH2-VH3-VL3-VL2-VH1-Fc; VH1-VL2-VL3-VH3-VH2-VL1-Fc; VL1-L1-VL2-L2-VL3-L3-VH3-L4-VH2-L5-VH1-Fc; VL1-L1-VL2-L2-VL3-L3-VH3-L4-VH2-L5-VH1-L6-Fc; VH1-L1-VH2-L2-VH3-L3-VL3-L4-VL2-L5-VL1-Fc; VH1-L1-VH2-L2-VH3-L3-VL3-L4-VL2-L5-VL1-L6-Fc; VL1-L1-VH2-L2-VL3-L3-VH3-L4-VL2-L5-VH1-Fc; VL1-L1-VH2-L2-VL3-L3-VH3-L4-VL2-L5-VH1-L6-Fc; VH1-L1-VL2-L2-VH3-L3-VL3-L4-VH2-L5-VL1-Fc; VH1-L1-VL2-L2-VH3-L3-VL3-L4-VH2-L5-VL1-L6-Fc; VL1-L1-VL2-L2-VH3-L3-VL3-L4-VH2-L5-VH1-Fc; VL1-L1-VL2-L2-VH3-L3-VL3-L4-VH2-L5-VH1-L6-Fc; VH1-L1-VH2-L2-VL3-L3-VH3-L4-VL2-L5-VL1-Fc; VH1-L1-VH2-L2-VL3-L3-VH3-L4-VL2-L5-VL1-L6-Fc; VL1-L1-VH2-L2-VH3-L3-VL3-L4-VL2-L5-VH1-Fc; VL1-L1-VH2-L2-VH3-L3-VL3-L4-VL2-L5-VH1-L6-Fc; VH1-L1-VL2-L2-VL3-L3-VH3-L4-VH2-L5-VL1-Fc; or VH1-L1-VL2-L2-VL3-L3-VH3-L4-VH2-L5-VL1-L6-Fc; wherein the second polypeptide has a structure represented by VL4-VL5; VL4-L7-VL5; VL4-CL; VL4-L7-CL; VL4-CH1; VL4-L7-CH1; VH4-VH5; VH4-L7-VH5; VH4-CL; VH4-L7-CL; VH4-CH1; VH4-L7-CH1; VL4-VL5-VL6; VL4-L7-VL5-L8-VL6; VL4-VL5-VL6-CL; VL4-L7-VL5-L8-VL6-CL; VL4-L7-VL5-L8-VL6-L9-CL; VL4-VL5-VL6-CH1; VL4-L7-VL5-L8-VL6-CH1; VL4-L7-VL5-L8-VL6-L9-CH1; VH4-VH5-VH6; VH4-L7-VH5-L8-VH6; VH4-VH5-VH6-CL; VH4-L7-VH5-L8-VH6-CL; VH4-L7-VH5-L8-VH6-L9-CL; VH4-VH5-VH6-CH1; VH4-L7-VH5-L8-VH6-CH1; or VH4-L7-VH5-L8-VH6-L9-CH1; wherein the third polypeptide has a structure represented by VH4-VH5-Fc; VH4-L10-VH5-Fc; VH4-L10-VH5-L11-Fc; VH4-CH1-Fc; VH4-L10-CH1-Fc; VH4-L10-CH1-L11-Fc; VH4-CL-Fc; VH4-L10-CL-Fc; VH4-L10-CL-L11-Fc; VH4-VH5-Fc; VH4-L10-VH5-Fc; VH4-L10-VH5-L11-Fc; VH4-VH5-VH6-Fc; VH4-L10-VH5-L11-VH6-Fc; VH4-L10-VH5-L11-VH6-L12-Fc; VH4-VH5-VH6-CH1-Fc; VH4-L10-VH5-L11-VH6-CH1-Fc; VH4-L10-VH5-L11-VH6-L12-CH1-Fc; VH4-L10-VH5-L11-VH6-L12-CH1-L13-Fc; VH4-VH5-VH6-CL-Fc; VH4-L10-VH5-L11-VH6-CL-Fc; VH4-L10-VH5-L11-VH6-L12-CL-Fc; VH4-L10-VH5-L11-VH6-L12-CL-L13-Fc; VL4-VL5-VL6-Fc; VL4-L10-VL5-L11-VL6-Fc; VL4-L10-VL5-L11-VL6-L12-Fc; VL4-VL5-VL6-CH1-Fc; VL4-L10-VL5-L11-VL6-CH1-Fc VL4-L10-VL5-L11-VL6-L12-CH1-Fc; VL4-L10-VL5-L11-VL6-L12-CH1-L13-Fc; VL4-VL5-VL6-CL-Fc; VL4-L10-VL5-L11-VL6-CL-Fc; VL4-L10-VL5-L11-VL6-L12-CL-Fc; or VL4-L10-VL5-L11-VL6-L12-CL-L13-Fc; wherein VL1 is a first immunoglobulin light chain variable region; VL2 is a second immunoglobulin light chain variable region; VL3 is a third immunoglobulin light chain variable region; VL4 is a fourth immunoglobulin light chain variable region; VL5 is a fifth immunoglobulin light chain variable region; VL6 is a sixth immunoglobulin light chain variable region; VH1 is a first immunoglobulin heavy chain variable region; VH2 is a second immunoglobulin heavy chain variable region; VH3 is a third immunoglobulin heavy chain variable region; VH4 is a fourth immunoglobulin heavy chain variable region; VH5 is a fifth immunoglobulin heavy chain variable region; VH6 is a sixth immunoglobulin heavy chain variable region; Fc is a region comprising an immunoglobulin heavy chain constant region 2 (CH2), an immunoglobulin heavy chain constant region 3 (CH3), and optionally, an immunoglobulin hinge; CH1 is a heavy chain constant region 1; CL is a light chain constant region; and L1, L2, L3, L4, L5, L6, L7, L8, L9, L10, L11, L12 and L13 are amino acid linkers. Any combination of VH1, VH2, VH3, VH4, VH5 and/or VH6 described above may be used in combination with any combination of VL1, VL2, VL3, VL4, VL5 and/or VL6 described above. Thus, any first polypeptide described above may be used in any combination with any second polypeptide described above and any third polypeptide described above. The first, second and third polypeptides may be selected independently.

[0830] In some aspects of any of the antigen binding polypeptides or antigen binding polypeptide complexes provided herein, the polypeptide comprises one or more CL region. In some aspects, CL comprises an amino acid sequence having at least 80%, at least 85%, at least 90%, at least 91%, at least 92%, at least 93%, at least 94%, at least 95%, at least 96%, at least 97%, at least 98%, at least 99% or 100% identity to SEQ ID NO:35. In some aspects, CL comprises an amino acid sequence having at least 90% to SEQ ID NO: 35. In some aspects, CL comprises the amino acid sequence of SEQ ID NO:35.

[0831] In some aspects of any of the antigen binding polypeptides or antigen binding polypeptide complexes provided herein, the polypeptide comprises one or more CH1 region. In some aspects, CH1 comprises an amino acid sequence having at least 80%, at least 85%, at least 90%, at least 91%, at least 92%, at least 93%, at least 94%, at least 95%, at least 96%, at least 97%, at least 98%, at least 99% or 100% identity to SEQ ID NO:36. In some aspects, CH1 comprises an amino acid sequence having at least 90% to SEQ ID NO: 36. In some aspects, CH1 comprises the amino acid sequence of SEQ ID NO:36.

[0832] In some aspects of the antigen binding polypeptides or antigen binding polypeptide complexes provided herein, the polypeptide or complex comprises an Fc region. In some aspects, Fc comprises an amino acid sequence having at least 80%, at least 85%, at least 90%, at least 91%, at least 92%, at least 93%, at least 94%, at least 95%, at least 96%, at least 97%, at least 98%, at least 99% or 100% identity to any one of SEQ ID NOs:37, 293 and 294. In some aspects, Fc comprises an amino acid sequence having at least 90% to any one of SEQ ID NOs: 37, 293 and 294. In some aspects, Fc comprises the amino acid sequence of any one of SEQ ID NOs:37, 293 and 294. In some aspects, Fc comprises an amino acid sequence having at least 80%, at least 85%, at least 90%, at least 91%, at least 92%, at least 93%, at least 94%, at least 95%, at least 96%, at least 97%, at least 98%, at least 99% or 100% identity to SEQ ID NO:37. In some aspects, Fc comprises an amino acid sequence having at least 80%, at least 85%, at least 90%, at least 91%, at least 92%, at least 93%, at least 94%, at least 95%, at least 96%, at least 97%, at least 98%, at least 99% or 100% identity to SEQ ID NO:293. In some aspects, Fc comprises an amino acid sequence having at least 80%, at least 85%, at least 90%, at least 91%, at least 92%, at least 93%, at least 94%, at least 95%, at least 96%, at least 97%, at least 98%, at least 99% or 100% identity to SEQ ID NO:294. In some aspects, Fc comprises an amino acid sequence having at least 90% to SEQ ID NO: 37. In some aspects, Fc comprises an amino acid sequence having at least 90% to SEQ ID NO: 293. In some aspects, Fc comprises an amino acid sequence having at least 90% to SEQ ID NO: 294. As used herein, “at least 90% identity” includes at least 91%, 92%, 93%, 94%, 95%, 96%, 97%, 98%, 99% and 100% identity to the recited reference sequence. In some aspects, Fc comprises the amino acid sequence of SEQ ID NO:37. In some aspects, Fc comprises the amino acid sequence of SEQ ID NO:293. In some aspects, Fc comprises the amino acid sequence of SEQ ID NO:294.

[0833] In some aspects, an antigen binding polypeptide complex provided herein comprises a first polypeptide comprising a first Fc region and a second polypeptide comprising a second Fc region. In some aspects, the first Fc region comprises an amino acid sequence having at least 80%, at least 85%, at least 90%, at least 91%, at least 92%, at least 93%, at least 94%, at least 95%, at least 96%, at least 97%, at least 98%, at least 99% or 100% identity to any one of SEQ ID NOs:37, 293 and 294, and the second Fc region comprises an amino acid sequence having at least 80%, at least 85%, at least 90%, at least 91%, at least 92%, at least 93%, at least 94%, at least 95%, at least 96%, at least 97%, at least 98%, at least 99% or 100% identity to any one of SEQ ID NOs:37, 293 and 294. In some aspects, the first Fc region comprises the amino acid sequence of any one of SEQ ID NOs:37, 293 and 294, and the second Fc region comprises an amino acid sequence of any one of SEQ ID NOs:37, 293 and 294. In some aspects, the first Fc region comprises an amino acid sequence having at least 80%, at least 85%, at least 90%, at least 91%, at least 92%, at least 93%, at least 94%, at least 95%, at least 96%, at least 97%, at least 98%, at least 99% or 100% identity to SEQ ID NO:37, and the second Fc region comprises an amino acid sequence having at least 80%, at least 85%, at least 90%, at least 91%, at least 92%, at least 93%, at least 94%, at least 95%, at least 96%, at least 97%, at least 98%, at least 99% or 100% identity to SEQ ID NO:37. In some aspects, the first Fc region comprises the amino acid sequence of SEQ ID NO:37, and the second Fc region comprises the amino acid sequence of SEQ ID NO:37. In some aspects, the first Fc region comprises an amino acid sequence having at least 80%, at least 85%, at least 90%, at least 91%, at least 92%, at least 93%, at least 94%, at least 95%, at least 96%, at least 97%, at least 98%, at least 99% or 100% identity to SEQ ID NO:293, and the second Fc region comprises an amino acid sequence having at least 80%, at least 85%, at least 90%, at least 91%, at least 92%, at least 93%, at least 94%, at least 95%, at least 96%, at least 97%, at least 98%, at least 99% or 100% identity to SEQ ID NO:293. In some aspects, the first Fc region comprises the amino acid sequence of SEQ ID NO:293, and the second Fc region comprises the amino acid sequence of SEQ ID NO:293. In some aspects, the first Fc region comprises an amino acid sequence having at least 80%, at least 85%, at least 90%, at least 91%, at least 92%, at least 93%, at least 94%, at least 95%, at least 96%, at least 97%, at least 98%, at least 99% or 100% identity to SEQ ID NO:294, and the second Fc region comprises an amino acid sequence having at least 80%, at least 85%, at least 90%, at least 91%, at least 92%, at least 93%, at least 94%, at least 95%, at least 96%, at least 97%, at least 98%, at least 99% or 100% identity to SEQ ID NO:294. In some aspects, the first Fc region comprises the amino acid sequence of SEQ ID NO:294, and the second Fc region comprises the amino acid sequence of SEQ ID NO:294. In some aspects, the first Fc region comprises an amino acid sequence having at least 80%, at least 85%, at least 90%, at least 91%, at least 92%, at least 93%, at least 94%, at least 95%, at least 96%, at least 97%, at least 98%, at least 99% or 100% identity to SEQ ID NO:293, and the second Fc region comprises an amino acid sequence having at least 80%, at least 85%, at least 90%, at least 91%, at least 92%, at least 93%, at least 94%, at least 95%, at least 96%, at least 97%, at least 98%, at least 99% or 100% identity to SEQ ID NO:294. In some aspects, the first Fc region comprises the amino acid sequence of SEQ ID NO:293, and the second Fc region comprises the amino acid sequence of SEQ ID NO:294. In some aspects, the first Fc region comprises an amino acid sequence having at least 80%, at least 85%, at least 90%, at least 91%, at least 92%, at least 93%, at least 94%, at least 95%, at least 96%, at least 97%, at least 98%, at least 99% or 100% identity to SEQ ID NO:294, and the second Fc region comprises an amino acid sequence having at least 80%, at least 85%, at least 90%, at least 91%, at least 92%, at least 93%, at least 94%, at least 95%, at least 96%, at least 97%, at least 98%, at least 99% or 100% identity to SEQ ID NO:293. In some aspects, the first Fc region comprises the amino acid sequence of SEQ ID NO:294, and the second Fc region comprises the amino acid sequence of SEQ ID NO:293. In some aspects, (i) the first Fc region comprises an amino acid sequence having at least 90% identity to SEQ ID NO: 37 and (ii) the second Fc region comprises an amino acid sequence having at least 90% identity to SEQ ID NO: 37. In some aspects, (i) the first Fc region comprises an amino acid sequence having at least 90% identity to SEQ ID NO: 37 and (ii) the second Fc region comprises an amino acid sequence having at least 90% identity to SEQ ID NO: 293. In some aspects, (i) the first Fc region comprises an amino acid sequence having at least 90% identity to SEQ ID NO: 37 and (ii) the second Fc region comprises an amino acid sequence having at least 90% identity to SEQ ID NO: 294. In some aspects, (i) the first Fc region comprises an amino acid sequence having at least 90% identity to SEQ ID NO: 293 and (ii) the second Fc region comprises an amino acid sequence having at least 90% identity to SEQ ID NO: 37. In some aspects, (i) the first Fc region comprises an amino acid sequence having at least 90% identity to SEQ ID NO: 293 and (ii) the second Fc region comprises an amino acid sequence having at least 90% identity to SEQ ID NO: 293. In some aspects, (i) the first Fc region comprises an amino acid sequence having at least 90% identity to SEQ ID NO: 293 and (ii) the second Fc region comprises an amino acid sequence having at least 90% identity to SEQ ID NO: 294. In some aspects, (i) the first Fc region comprises an amino acid sequence having at least 90% identity to SEQ ID NO: 294 and (ii) the second Fc region comprises an amino acid sequence having at least 90% identity to SEQ ID NO: 37. In some aspects, (i) the first Fc region comprises an amino acid sequence having at least 90% identity to SEQ ID NO: 294 and (ii) the second Fc region comprises an amino acid sequence having at least 90% identity to SEQ ID NO: 293. In some aspects, (i) the first Fc region comprises an amino acid sequence having at least 90% identity to SEQ ID NO: 294 and (ii) the second Fc region comprises an amino acid sequence having at least 90% identity to SEQ ID NO: 294. As used herein, “at least 90% identity” includes at least 91%, 92%, 93%, 94%, 95%, 96%, 97%, 98%, 99% and 100% identity to the recited reference sequence.

[0834] Molecular biology and recombinant DNA methods for making, screening and engineering an antigen binding polypeptide or antigen binding polypeptide complex (e.g., an antibody or antigen binding fragment thereof) containing such sequences are well known and described, for example, in Adair et al. Human Antibodies, 5(1-2):41-47, 1994; Kostelny et al., J Immunol, 148(5):1547-1553, 1992, Shiraiwa et al., Methods, 154:10-20, 2019; and Zola, “Monoclonal Antibodies: A Manual of Techniques,” 1987, 1st Ed., CRC Press; and Steinitz, Human Antibodies, 18(1-2):1-10, 2009.

[0835] As used herein, an antigen binding polypeptide or antigen binding polypeptide complex (e.g., an antibody or antigen binding fragment thereof), or region or domain thereof that “specifically binds” refers to its association with an epitope by its antigen binding domain, and that the binding entails some complementarity between the antigen binding domain and the epitope. Specific binding to an epitope occurs where there is binding to that epitope via its antigen binding domain more readily than there would be binding to a random, unrelated epitope.

[0836] As used herein, an “epitope” refers to a localized region of an antigen to which an antigen binding polypeptide or antigen binding polypeptide complex (e.g., antibody or antigen binding fragment thereof) can specifically bind. An epitope can be, for example, contiguous amino acids of a polypeptide (linear or contiguous epitope) or an epitope can, for example, come together from two or more non-contiguous regions of a polypeptide or polypeptides (conformational, non-linear, discontinuous, or non-contiguous epitope). In some aspects, the epitope to which an antibody or antigen-binding fragment thereof binds can be determined by, e.g., NMR spectroscopy, X-ray diffraction crystallography studies, ELISA assays, hydrogen/deuterium exchange coupled with mass spectrometry (e.g., liquid chromatography electrospray mass spectrometry), array-based oligo-peptide scanning assays, and/or mutagenesis mapping (e.g., site-directed mutagenesis mapping). See, e.g., Giege R et al., (1994) Acta Crystallogr D Biol Crystallogr 50(Pt 4): 339-350; McPherson A (1990) Eur J Biochem 189: 1-23; Chayen N E (1997) Structure 5: 1269-1274; McPherson A (1976) J Biol Chem 251: 6300-6303; Meth Enzymol (1985) volumes 114 & 115, eds Wyckoff H W et al., U.S. Pub. No. 2004/0014194), Bricogne G (1993) Acta Crystallogr D Biol Crystallogr 49(Pt 1): 37-60, Bricogne G (1997) Meth Enzymol 276A: 361-423, ed Carter C W, and Roversi et al., (2000) Acta Crystallogr D Biol Crystallogr 56(Pt 10): 1316-1323 (X-ray diffraction crystallography studies); and Champe et al., (1995) J Biol Chem 270: 1388-1394 and Cunningham B C & Wells J A (1989) Science 244: 1081-1085 (mutagenesis mapping).

[0837] Specific binding can be represented by a “binding affinity.” Binding affinity refers to an intrinsic binding affinity which reflects a 1:1 interaction between members of a binding pair (e.g., an antigen binding polypeptide complex and an antigen). Binding affinity can be measured and/or expressed in several ways known in the art, including, but not limited to, equilibrium dissociation constant (K_{D}). K_{D} is calculated from the quotient of k_{off}/kₒₙ, where kₒₙ refers to the association rate constant of, e.g., an antigen binding polypeptide complex to an antigen, and k_{off} refers to the dissociation of, e.g., an antigen binding polypeptide complex from an antigen. The kₒₙ and k_{off} can be determined by techniques known to one of ordinary skill in the art, such as Octet® BLI, BIAcore® or KinExA.

[0838] Accordingly, in some aspects, an antigen binding polypeptide complex provided herein is an antibody or antigen binding fragment thereof. In some aspects, an antigen binding polypeptide provided herein is part of an antibody or antigen binding fragment thereof.

[0839] In some aspects, the antibody or antigen binding fragment thereof specifically binds to an antigen with an equilibrium dissociation constant (K_{D}) of from about 10 μM to about 1 μM. In some aspects, the antibody is IgG, IgM, IgE, IgA or IgD. In some aspects, the IgG is IgG1, IgG2, IgG3 or IgG4. In some aspects, the antigen binding fragment is a Fab, scFab, Fab′, F(ab′)₂, Fv or scFv. In some aspects, the antibody is human or humanized.

[0840] In some aspects, an antigen binding polypeptide complex provided herein (e.g., an antibody or antigen binding fragment thereof) is tetravalent. In some aspects, an antigen binding polypeptide complex provided herein (e.g., an antibody or antigen binding fragment thereof) is hexavalent.

[0841] Also provided herein is an anti-SARS-CoV2 multivalent antibody that exhibits improved prevention of immune escape compared to (i) a monovalent anti-SARS-CoV2 antibody that binds to one of the same antigens as the anti-SARS-CoV2 multivalent antibody, and/or (ii) a combination of monovalent anti-SARS-CoV2 antibodies that binds to the same antigens as the anti-SARS-CoV2 multivalent antibody.

[0842] In some aspects, the anti-SARS-CoV2 multivalent antibody exhibits improved prevention of immune escape compared to a monovalent anti-SARS-CoV2 antibody that binds to one of the same antigens as the anti-SARS-CoV2 multivalent antibody.

[0843] In some aspects, the anti-SARS-CoV2 multivalent antibody exhibits increased neutralization potency compared to a combination of monovalent anti-SARS-CoV2 antibodies that binds to the same antigens as the anti-SARS-CoV2 multivalent antibody.

[0844] In some aspects, the anti-SARS-CoV2 multispecific antibody prevents immune escape of the anti-SARS-CoV2 multivalent antibody for at least 2, at least 3, at least 4, at least 5, at least 6, or at least 7 selection rounds as measured by an antibody escape assay. In some aspects, the anti-SARS-CoV2 multispecific antibody prevents immune escape of the anti-SARS-CoV2 multivalent antibody for about 2 to about 7 selection rounds as measured by an antibody escape assay, or any value or range of values therein, for example, for about 3 to about 7 selection rounds, about 4 to about 7 selection rounds, about 5 to about 7 selection rounds, about 6 to about 7 selection rounds, about 2 to about 6 selection rounds, about 3 to about 6 selection rounds, about 4 to about 6 selection rounds, about 5 to about 6 selection rounds, about 2 to about 5 selection rounds, about 3 to about 5 selection rounds, about 4 to about 5 selection rounds, about 2 to about 4 selection rounds, about 3 to about 4 selection rounds, or about 2 to about 3 selection rounds as measured by an antibody escape assay. In some aspects, the anti-SARS-CoV2 multispecific antibody prevents immune escape of the anti-SARS-CoV2 multivalent antibody for about 2, about 3, about 4, about 5, about 6 or about 7 selection rounds as measured by an antibody escape assay.

[0845] In some aspects, the anti-SARS-CoV2 multispecific antibody prevents immune escape of the anti-SARS-CoV2 multivalent antibody following at least 2, at least 3, at least 4, at least 5, at least 6, or at least 7 exposures to the subject by the SARS-CoV2 virus. In some aspects, the anti-SARS-CoV2 multispecific antibody prevents immune escape of the anti-SARS-CoV2 multivalent antibody following about 2 to about 7 exposures to the subject by the SARS-CoV2 virus, or any value or range of values therein, for example, for about 3 to about 7 exposures, about 4 to about 7 exposures, about 5 to about 7 exposures, about 6 to about 7 exposures, about 2 to about 6 exposures, about 3 to about 6 exposures, about 4 to about 6 exposures, about 5 to about 6 exposures, about 2 to about 5 exposures, about 3 to about 5 exposures, about 4 to about 5 exposures, about 2 to about 4 exposures, about 3 to about 4 exposures, or about 2 to about 3 exposures to the subject by the SARS-CoV2 virus. In some aspects, the anti-SARS-CoV2 multispecific antibody prevents immune escape of the anti-SARS-CoV2 multivalent antibody following about 2, about 3, about 4, about 5, about 6 or about 7 exposures to the subject by the SARS-CoV2 virus.

[0846] In some aspects, the anti-SARS-CoV2 multispecific antibody is at least 100-fold, at least 500-fold, at least 1,000-fold, or at least 2,000-fold more effective in inhibiting growth of the SARS-CoV2 virus compared to (i) a monovalent anti-SARS-CoV2 antibody that binds to one of the same antigens as the anti-SARS-CoV2 multivalent antibody and/or (ii) a combination of monovalent anti-SARS-CoV2 antibodies that binds to the same antigens as the anti-SARS-CoV2 multivalent antibody. In some aspects, the anti-SARS-CoV2 multispecific antibody is from about 100-fold to about 2,000-fold more effective in inhibiting growth of the SARS-CoV2 virus compared to (i) a monovalent anti-SARS-CoV2 antibody that binds to one of the same antigens as the anti-SARS-CoV2 multivalent antibody and/or (ii) a combination of monovalent anti-SARS-CoV2 antibodies that binds to the same antigens as the anti-SARS-CoV2 multivalent antibody, or any value or range of values therein, for example, from about 500-fold to about 2,000-fold, about 1,000-fold to about 2,000-fold, about 100-fold to about 1,000-fold, about 500-fold to about 1,000-fold, or about 100-fold to about 500-fold. In some aspects, the anti-SARS-CoV2 multispecific antibody is about 100-fold, about 500-fold, about 1,000-fold, or about 2,000-fold more effective in inhibiting growth of the SARS-CoV2 virus compared to (i) a monovalent anti-SARS-CoV2 antibody that binds to one of the same antigens as the anti-SARS-CoV2 multivalent antibody and/or (ii) a combination of monovalent anti-SARS-CoV2 antibodies that binds to the same antigens as the anti-SARS-CoV2 multivalent antibody.

[0847] In some aspects, the anti-SARS-CoV2 multivalent antibody comprises a first antigen binding site that specifically binds to a SARS-CoV-2 protein and a second antigen binding site that specifically binds to a SARS-CoV-2 protein.

[0848] In some aspects, the first antigen binding site is different than the second antigen binding site.

[0849] In some aspects, the first antigen binding site comprises a first heavy chain variable domain and a first light chain variable domain, and the second antigen binding site comprises a second heavy chain variable domain and a second light chain variable domain.

[0850] In some aspects, the first and second heavy chain variable regions each comprise CDR1, CDR2 and CDR3 regions, and the first and second light chain variable region each comprise CDR1, CDR2 and CDR3 regions.

[0851] In some aspects, the CDR1 of the first heavy chain variable region comprises an amino acid sequence having at least 80%, at least 85%, at least 90%, at least 91%, at least 92%, at least 93%, at least 94%, at least 95%, at least 96%, at least 97%, at least 98%, at least 99% or 100% identity to any one of SEQ ID NOs:43, 51, 59, 67, 75. 171, 179, 187, 264, 272, 280, 288, 513, 521, 529, 537, 545, 553, 561, 569, 577, 585, 593, 601, 609, 617, 639, 647, 656 and 664; the CDR2 of the first heavy chain variable region comprises an amino acid sequence having at least 80%, at least 85%, at least 90%, at least 91%, at least 92%, at least 93%, at least 94%, at least 95%, at least 96%, at least 97%, at least 98%, at least 99% or 100% identity to any one of SEQ ID NOs:44, 52, 60, 68, 76, 172, 180, 188, 265, 273, 281, 289, 514, 522, 530, 538, 546, 554, 562, 570, 578, 586, 594, 602, 610, 618, 640, 648, 657 and 665; the CDR3 of the first heavy chain variable region comprises an amino acid sequence having at least 80%, at least 85%, at least 90%, at least 91%, at least 92%, at least 93%, at least 94%, at least 95%, at least 96%, at least 97%, at least 98%, at least 99% or 100% identity to any one of SEQ ID NOs:45, 53, 61, 69, 77, 173, 181, 189, 266, 274, 282, 290, 515, 523, 531, 539, 547, 555, 563, 571, 579, 587, 595, 603, 611, 619, 641, 649, 658 and 666; the CDR1 of the first light chain variable region comprises an amino acid sequence having at least 80%, at least 85%, at least 90%, at least 91%, at least 92%, at least 93%, at least 94%, at least 95%, at least 96%, at least 97%, at least 98%, at least 99% or 100% identity to any one of SEQ ID NOs:39, 47, 55, 63, 71, 167, 175, 183, 260, 268, 276, 284, 517, 525, 533, 541, 549, 557, 565, 573, 581, 589, 597, 605, 613, 621, 643, 651, 660 and 668; the CDR2 of the first light chain variable region comprises an amino acid sequence having at least 80%, at least 85%, at least 90%, at least 91%, at least 92%, at least 93%, at least 94%, at least 95%, at least 96%, at least 97%, at least 98%, at least 99% or 100% identity to any one of SEQ ID NOs:40, 48, 56, 64, 72, 168, 176, 184, 261, 269, 277 (having the sequence of LGS), 285, 518 (having the sequence of DAS), 526 (having the sequence of DVS), 534 (having the sequence of EDS), 542 (having the sequence of KDS), 550 (having the sequence of DAS), 558 (having the sequence of AAS), 566 (having the sequence of GAS), 574 (having the sequence of DDS), 582 (having the sequence of KDS), 590 (having the sequence of SAS), 598 (having the sequence of SAS), 606 (having the sequence of GAS), 614 (having the sequence of GAS), 622 (having the sequence of GAS), 644 (having the sequence of GAS), 652 (having the sequence of SAS), 661 (having the sequence of GAS) and 669 (having the sequence of DAS); the CDR3 of the first light chain variable region comprises an amino acid sequence having at least 80%, at least 85%, at least 90%, at least 91%, at least 92%, at least 93%, at least 94%, at least 95%, at least 96%, at least 97%, at least 98%, at least 99% or 100% identity to any one of SEQ ID NOs:41, 49, 57, 65, 73, 169, 177, 185, 262, 270, 278, 286, 519, 527, 535, 543, 551, 559, 567, 575, 583, 591, 599, 607, 615, 623, 645, 653, 662 and 670; the CDR1 of the second heavy chain variable region comprises an amino acid sequence having at least 80%, at least 85%, at least 90%, at least 91%, at least 92%, at least 93%, at least 94%, at least 95%, at least 96%, at least 97%, at least 98%, at least 99% or 100% identity to any one of SEQ ID NOs:43, 51, 59, 67, 75, 171, 179, 187, 264, 272, 280, 288, 513, 521, 529, 537, 545, 553, 561, 569, 577, 585, 593, 601, 609, 617, 639, 647, 656 and 664; the CDR2 of the second heavy chain variable region comprises an amino acid sequence having at least 80%, at least 85%, at least 90%, at least 91%, at least 92%, at least 93%, at least 94%, at least 95%, at least 96%, at least 97%, at least 98%, at least 99% or 100% identity to any one of SEQ ID NOs:44, 52, 60, 68, 76, 172, 180, 188, 265, 273, 281, 289, 514, 522, 530, 538, 546, 554, 562, 570, 578, 586, 594, 602, 610, 618, 640, 648, 657 and 665; the CDR3 of the second heavy chain variable region comprises an amino acid sequence having at least 80%, at least 85%, at least 90%, at least 91%, at least 92%, at least 93%, at least 94%, at least 95%, at least 96%, at least 97%, at least 98%, at least 99% or 100% identity to any one of SEQ ID NOs:45, 53, 61, 69, 77, 173, 181, 189, 266, 274, 282, 290, 515, 523, 531, 539, 547, 555, 563, 571 and 579, 587, 595, 603, 611, 619, 641, 649, 658 and 666; the CDR1 of the second light chain variable region comprises an amino acid sequence having at least 80%, at least 85%, at least 90%, at least 91%, at least 92%, at least 93%, at least 94%, at least 95%, at least 96%, at least 97%, at least 98%, at least 99% or 100% identity to any one of SEQ ID NOs:39, 47, 55, 63, 71, 167, 175, 183, 260, 268, 276, 284, 517, 525, 533, 541, 549, 557, 565, 573, 581, 589, 597, 605, 613, 621, 643, 651, 660 and 668; the CDR2 of the second light chain variable region comprises an amino acid sequence having at least 80%, at least 85%, at least 90%, at least 91%, at least 92%, at least 93%, at least 94%, at least 95%, at least 96%, at least 97%, at least 98%, at least 99% or 100% identity to any one of SEQ ID NOs:40, 48, 56, 64, 72, 168, 176.184, 261, 269, 277 (having the sequence of LGS), 285, 518 (having the sequence of DAS), 526 (having the sequence of DVS), 534 (having the sequence of EDS), 542 (having the sequence of KDS), 550 (having the sequence of DAS), 558 (having the sequence of AAS), 566 (having the sequence of GAS), 574 (having the sequence of DDS), 582 (having the sequence of KDS), 590 (having the sequence of SAS), 598 (having the sequence of SAS), 606 (having the sequence of GAS), 614 (having the sequence of GAS), 622 (having the sequence of GAS), 644 (having the sequence of GAS), 652 (having the sequence of SAS), 661 (having the sequence of GAS) and 669 (having the sequence of DAS); and the CDR3 of the second light chain variable region comprises an amino acid sequence having at least 80%, at least 85%, at least 90%, at least 91%, at least 92%, at least 93%, at least 94%, at least 95%, at least 96%, at least 97%, at least 98%, at least 99% or 100% identity to any one of SEQ ID NOs:41, 49, 57, 65, 73, 169, 177, 185, 262, 270, 278, 286, 519, 527, 535, 543, 551, 559, 567, 575, 583, 591, 599, 607, 615, 623, 645, 653, 662 and 670. In some preferred aspects, CDR1, CDR2 and CDR3 of each of the first heavy chain variable region, the second heavy chain variable region, the first light chain variable region and the second light chain variable region have at least 90% identity with a corresponding amino acid sequences specified above. As used herein, “at least 90% identity” includes at least 91%, 92%, 93%, 94%, 95%, 96%, 97%, 98%, 99% and 100% identity to the recited reference sequence. In some particularly preferred aspects, CDR1, CDR2 and CDR3 of each of the first heavy chain variable region, the second heavy chain variable region, the first light chain variable region and the second light chain variable region comprise or consist of a corresponding amino acid sequences specified above.

[0852] In some aspects, the first heavy chain variable domain comprises an amino acid sequence having at least 80%, at least 85%, at least 90%, at least 91%, at least 92%, at least 93%, at least 94%, at least 95%, at least 96%, at least 97%, at least 98%, or 100% identity to any one of SEQ ID NOs:42, 50, 58, 66, 74, 170, 178, 186, 263, 271, 279, 287, 510, 512, 520, 528, 536, 544, 552, 560, 568, 576, 584, 592, 600, 608, 616, 624, 626, 628, 630, 632, 634, 636, 638, 646, 654, 663, 779, 781, 785 and 787; the first light chain variable domain comprises an amino acid sequence having at least 80%, at least 85%, at least 90%, at least 91%, at least 92%, at least 93%, at least 94%, at least 95%, at least 96%, at least 97%, at least 98%, or 100% identity to any one of SEQ ID NOs:38, 46, 54, 62, 70, 166, 174, 182, 259, 267, 275, 283, 508, 509, 511, 516, 524, 532, 540, 548, 556, 564, 572, 580, 588, 596, 604, 612, 620, 625, 627, 629, 631, 633, 635, 637, 642, 650, 659 and 667; the second heavy chain variable domain comprises an amino acid sequence having at least 80%, at least 85%, at least 90%, at least 91%, at least 92%, at least 93%, at least 94%, at least 95%, at least 96%, at least 97%, at least 98%, or 100% identity to any one of SEQ ID NOs:42, 50, 58, 66, 74, 170, 178, 186, 263, 271, 279, 287, 510, 512, 520, 528, 536, 544, 552, 560, 568, 576, 584, 592, 600, 608, 616, 624, 626, 628, 630, 632, 634, 636, 638, 646, 654, 663, 779, 781, 785 and 787; and the second light chain variable domain comprises an amino acid sequence having at least 80%, at least 85%, at least 90%, at least 91%, at least 92%, at least 93%, at least 94%, at least 95%, at least 96%, at least 97%, at least 98%, or 100% identity to any one of SEQ ID NOs:38, 46, 54, 62, 70, 166, 174, 182, 259, 267, 275, 283, 508, 509, 511, 516, 524, 532, 540, 548, 556, 564, 572, 580, 588, 596, 604, 612, 620, 625, 627, 629, 631, 633, 635, 637, 642, 650, 659 and 667. In some aspects, the sequence has a mutation at N62, for example, N62Q or N62Q at, for example, SEQ ID NO:279. In some preferred aspects, each of the first heavy chain variable region, the second heavy chain variable region, the first light chain variable region and the second light chain variable region have at least 90% identity with a corresponding amino acid sequences specified above, optionally with a mutation at N62 as described above. As used herein, “at least 90% identity” includes at least 91%, 92%, 93%, 94%, 95%, 96%, 97%, 98%, 99% and 100% identity to the recited reference sequence. In some particularly preferred aspects, each of the first heavy chain variable region, the second heavy chain variable region, the first light chain variable region and the second light chain variable region comprise or consist of a corresponding amino acid sequences specified above, optionally with a mutation at N62 as described above.

[0853] In some aspects, the anti-SARS-CoV2 multivalent antibody further comprises a third antigen binding domain.

[0854] In some aspects, the third antigen binding site is different than the first antigen binding site, the second antigen binding site, or both the first and second antigen binding sites.

[0855] In some aspects, the third antigen binding site comprises a third heavy chain variable domain and a third light chain variable domain.

[0856] In some aspects, the third heavy chain variable domain comprises an amino acid sequence having at least 80%, at least 85%, at least 90%, at least 91%, at least 92%, at least 93%, at least 94%, at least 95%, at least 96%, at least 97%, at least 98%, or 100% identity to any one of SEQ ID NOs:42, 50, 58, 66, 74, 170, 178, 186, 263, 271, 279, 287, 510, 512, 520, 528, 536, 544, 552, 560, 568, 576, 584, 592, 600, 608, 616, 624, 626, 628, 630, 632, 634, 636, 638, 646, 654, 663, 779, 781, 785 and 787; and the third light chain variable domain comprises an amino acid sequence having at least 80%, at least 85%, at least 90%, at least 91%, at least 92%, at least 93%, at least 94%, at least 95%, at least 96%, at least 97%, at least 98%, or 100% identity to any one of SEQ ID NOs:38, 46, 54, 62, 70, 166, 174, 182, 259, 267, 275, 283, 508, 509, 511, 516, 524, 532, 540, 548, 556, 564, 572, 580, 588, 596, 604, 612, 620, 625, 627, 629, 631, 633, 635, 637, 642, 650, 659 and 667. In some aspects, the sequence has a mutation at N62, for example, N62Q or N62Q at, for example, SEQ ID NO:279. In some preferred aspects, the third heavy chain variable domain has at least 90% identity with a corresponding amino acid sequences specified above, optionally with a mutation at N62 as described above. As used herein, “at least 90% identity” includes at least 91%, 92%, 93%, 94%, 95%, 96%, 97%, 98%, 99% and 100% identity to the recited reference sequence. In some particularly preferred aspects, the third heavy chain variable domain comprises or consists of a corresponding amino acid sequences specified above, optionally with a mutation at N62 as described above.

[0857] In some aspects, the third heavy chain variable region comprises CDR1, CDR2 and CDR3 regions.

[0858] In some aspects, the CDR1 of the third heavy chain variable region comprises an amino acid sequence having at least 80%, at least 85%, at least 90%, at least 91%, at least 92%, at least 93%, at least 94%, at least 95%, at least 96%, at least 97%, at least 98%, at least 99% or 100% identity to any one of SEQ ID NOs:43, 51, 59, 67, 75, 171, 179, 187, 264, 272, 280, 288, 513, 521, 529, 537, 545, 553, 561, 569, 577, 585, 593, 601, 609, 617, 639, 647, 656 and 664; the CDR2 of the third heavy chain variable region comprises an amino acid sequence having at least 80%, at least 85%, at least 90%, at least 91%, at least 92%, at least 93%, at least 94%, at least 95%, at least 96%, at least 97%, at least 98%, at least 99% or 100% identity to any one of SEQ ID NOs:44, 52, 60, 68, 76, 172, 180, 188, 265, 273, 281, 289, 514, 522, 530, 538, 546, 554, 562, 570, 578, 586, 594, 602, 610, 618, 640, 648, 657 and 665; the CDR3 of the third heavy chain variable region comprises an amino acid sequence having at least 80%, at least 85%, at least 90%, at least 91%, at least 92%, at least 93%, at least 94%, at least 95%, at least 96%, at least 97%, at least 98%, at least 99% or 100% identity to any one of SEQ ID NOs:45, 53, 61, 69, 77, 173, 181, 189, 266, 274, 282, 290, 515, 523, 531, 539, 547, 555, 563, 571, 579, 587, 595, 603, 611, 619, 641, 649, 658 and 666; the CDR1 of the third light chain variable region comprises an amino acid sequence having at least 80%, at least 85%, at least 90%, at least 91%, at least 92%, at least 93%, at least 94%, at least 95%, at least 96%, at least 97%, at least 98%, at least 99% or 100% identity to any one of SEQ ID NOs:39, 47, 55, 63, 71, 167, 175, 183, 260, 268, 276, 284, 517, 525, 533, 541, 549, 557, 565, 573, 581, 589, 597, 605, 613, 621, 643, 651, 660 and 668; the CDR2 of the third light chain variable region comprises an amino acid sequence having at least 80%, at least 85%, at least 90%, at least 91%, at least 92%, at least 93%, at least 94%, at least 95%, at least 96%, at least 97%, at least 98%, at least 99% or 100% identity to any one of SEQ ID NOs:40, 48, 56, 64, 72, 168, 176, 184, 261, 269, 277 (having the sequence of LGS), 285, 518 (having the sequence of DAS), 526 (having the sequence of DVS), 534 (having the sequence of EDS), 542 (having the sequence of KDS), 550 (having the sequence of DAS), 558 (having the sequence of AAS), 566 (having the sequence of GAS), 574 (having the sequence of DDS), 582 (having the sequence of KDS), 590 (having the sequence of SAS), 598 (having the sequence of SAS), 606 (having the sequence of GAS), 614 (having the sequence of GAS), 622 (having the sequence of GAS), 644 (having the sequence of GAS), 652 (having the sequence of SAS), 661 (having the sequence of GAS) and 669 (having the sequence of DAS); and the CDR3 of the third light chain variable region comprises an amino acid sequence having at least 80%, at least 85%, at least 90%, at least 91%, at least 92%, at least 93%, at least 94%, at least 95%, at least 96%, at least 97%, at least 98%, at least 99% or 100% identity to any one of SEQ ID NOs:41, 49, 57, 65, 73, 169, 177, 185, 262, 270, 278, 286, 519, 527, 535, 543, 551, 559, 567, 575, 583, 591, 599, 607, 615, 623, 645, 653, 662 and 670. In some preferred aspects, CDR1, CDR2 and CDR3 of each of the third heavy chain variable region and the third light chain variable region have at least 90% identity with a corresponding amino acid sequences specified above. As used herein, “at least 90% identity” includes at least 91%, 92%, 93%, 94%, 95%, 96%, 97%, 98%, 99% and 100% identity to the recited reference sequence. In some particularly preferred aspects, CDR1, CDR2 and CDR3 of each of the third heavy chain variable region and the third light chain variable region comprise or consist of a corresponding amino acid sequences specified above.

[0859] In some aspects, the anti-SARS-CoV2 multivalent antibody further comprises a fourth antigen binding domain.

[0860] In some aspects, the fourth antigen binding site is different than one or more of the first, second and third antigen binding sites.

[0861] In some aspects, the first, second, third and fourth antigen binding sites are different.

[0862] In some aspects, the fourth antigen binding site comprises a third heavy chain variable domain and a fourth light chain variable domain.

[0863] In some aspects, the fourth heavy chain variable domain comprises an amino acid sequence having at least 80%, at least 85%, at least 90%, at least 91%, at least 92%, at least 93%, at least 94%, at least 95%, at least 96%, at least 97%, at least 98%, or 100% identity to any one of SEQ ID NOs:42, 50, 58, 66, 74, 170, 178, 186, 263, 271, 279, 287, 510, 512, 520, 528, 536, 544, 552, 560, 568, 576, 584, 592, 600, 608, 616, 624, 626, 628, 630, 632, 634, 636, 638, 646, 654, 663, 779, 781, 785 and 787; and the fourth light chain variable domain comprises an amino acid sequence having at least 80%, at least 85%, at least 90%, at least 91%, at least 92%, at least 93%, at least 94%, at least 95%, at least 96%, at least 97%, at least 98%, or 100% identity to any one of SEQ ID NOs:38, 46, 54, 62, 70, 166, 174, 182, 259, 267, 275, 283, 508, 509, 511, 516, 524, 532, 540, 548, 556, 564, 572, 580, 588, 596, 604, 612, 620, 625, 627, 629, 631, 633, 635, 637, 642, 650, 659 and 667. In some aspects, the sequence has a mutation at N62, for example, N62Q or N62Q at, for example, SEQ ID NO:279. In some preferred aspects, the fourth heavy chain variable domain has at least 90% identity with a corresponding amino acid sequences specified above, optionally with a mutation at N62 as described above. As used herein, “at least 90% identity” includes at least 91%, 92%, 93%, 94%, 95%, 96%, 97%, 98%, 99% and 100% identity to the recited reference sequence. In some particularly preferred aspects, the fourth heavy chain variable domain comprises or consists of a corresponding amino acid sequences specified above, optionally with a mutation at N62 as described above.

[0864] In some aspects, the fourth heavy chain variable region comprises CDR1, CDR2 and CDR3 regions.

[0865] In some aspects, the CDR1 of the fourth heavy chain variable region comprises an amino acid sequence having at least 80%, at least 85%, at least 90%, at least 91%, at least 92%, at least 93%, at least 94%, at least 95%, at least 96%, at least 97%, at least 98%, at least 99% or 100% identity to any one of SEQ ID NOs:43, 51, 59, 67, 75, 171, 179,187, 264, 272, 280, 288, 513, 521, 529, 537, 545, 553, 561, 569, 577, 585, 593, 601, 609, 617, 639, 647, 656 and 664; the CDR2 of the fourth heavy chain variable region comprises an amino acid sequence having at least 80%, at least 85%, at least 90%, at least 91%, at least 92%, at least 93%, at least 94%, at least 95%, at least 96%, at least 97%, at least 98%, at least 99% or 100% identity to any one of SEQ ID NOs:44, 52, 60, 68, 76, 172, 180, 188, 265, 273, 281, 289, 514, 522, 530, 538, 546, 554, 562, 570, 578, 586, 594, 602, 610, 618, 640, 648, 657 and 665; the CDR3 of the fourth heavy chain variable region comprises an amino acid sequence having at least 80%, at least 85%, at least 90%, at least 91%, at least 92%, at least 93%, at least 94%, at least 95%, at least 96%, at least 97%, at least 98%, at least 99% or 100% identity to any one of SEQ ID NOs:45, 53, 61, 69, 77, 173, 181, 189, 266, 274, 282, 290, 515, 523, 531, 539, 547, 555, 563, 571, 579, 587, 595, 603, 611, 619, 641, 649, 658 and 666; the CDR1 of the fourth light chain variable region comprises an amino acid sequence having at least 80%, at least 85%, at least 90%, at least 91%, at least 92%, at least 93%, at least 94%, at least 95%, at least 96%, at least 97%, at least 98%, at least 99% or 100% identity to any one of SEQ ID NOs:39, 47, 55, 63, 71, 167, 175, 183, 260, 268, 276, 284, 517, 525, 533, 541, 549, 557, 565, 573, 581, 589, 597, 605, 613, 621, 643, 651, 660 and 668; the CDR2 of the fourth light chain variable region comprises an amino acid sequence having at least 80%, at least 85%, at least 90%, at least 91%, at least 92%, at least 93%, at least 94%, at least 95%, at least 96%, at least 97%, at least 98%, at least 99% or 100% identity to any one of SEQ ID NOs:40, 48, 56, 64, 72, 168, 176, 184, 261, 269, 277 (having the sequence of LGS), 285, 518 (having the sequence of DAS), 526 (having the sequence of DVS), 534 (having the sequence of EDS), 542 (having the sequence of KDS), 550 (having the sequence of DAS), 558 (having the sequence of AAS), 566 (having the sequence of GAS), 574 (having the sequence of DDS), 582 (having the sequence of KDS), 590 (having the sequence of SAS), 598 (having the sequence of SAS), 606 (having the sequence of GAS), 614 (having the sequence of GAS), 622 (having the sequence of GAS), 644 (having the sequence of GAS), 652 (having the sequence of SAS), 661 (having the sequence of GAS) and 669 (having the sequence of DAS); and the CDR3 of the fourth light chain variable region comprises an amino acid sequence having at least 80%, at least 85%, at least 90%, at least 91%, at least 92%, at least 93%, at least 94%, at least 95%, at least 96%, at least 97%, at least 98%, at least 99% or 100% identity to any one of SEQ ID NOs:41, 49, 57, 65, 73, 169, 177, 185, 262, 270, 278, 286, 519, 527, 535, 543, 551, 559, 567, 575, 583, 591, 599, 607, 615, 623, 645, 653, 662 and 670. In some preferred aspects, CDR1, CDR2 and CDR3 of each of the fourth heavy chain variable region and the fourth light chain variable region have at least 90% identity with a corresponding amino acid sequences specified above. As used herein, “at least 90% identity” includes at least 91%, 92%, 93%, 94%, 95%, 96%, 97%, 98%, 99% and 100% identity to the recited reference sequence. In some particularly preferred aspects, CDR1, CDR2 and CDR3 of each of the fourth heavy chain variable region and the fourth light chain variable region comprise or consist of a corresponding amino acid sequences specified above.

[0866] In some aspects, VH1, VH2 and/or VH3 (e.g., VH1; V12; VH3; VH1 and V12; VH1 and VH3; VH2 and VH3; or VH1, VH2 and VH3) of an antigen binding polypeptide or antigen binding complex provided herein comprise a CDR1 comprising an amino acid sequence having at least 80%, at least 85%, at least 90%, at least 91%, at least 92%, at least 93%, at least 94%, at least 95%, at least 96%, at least 97%, at least 98%, at least 99% or 100% identity to SEQ ID NO:585; a CDR2 comprising an amino acid sequence having at least 80%, at least 85%, at least 90%, at least 91%, at least 92%, at least 93%, at least 94%, at least 95%, at least 96%, at least 97%, at least 98%, at least 99% or 100% identity to SEQ ID NO:586; and a CDR3 comprising an amino acid sequence having at least 80%, at least 85%, at least 90%, at least 91%, at least 92%, at least 93%, at least 94%, at least 95%, at least 96%, at least 97%, at least 98%, at least 99% or 100% identity to SEQ ID NO:587. In some aspects, CDR1, CDR2 and CDR3 of VH1 have at least 90% identity with the corresponding amino acid sequences specified above. In some aspects, CDR1, CDR2 and CDR3 of VH2 have at least 90% identity with the corresponding amino acid sequences specified above. In some aspects, CDR1, CDR2 and CDR3 of VH3 have at least 90% identity with the corresponding amino acid sequences specified above. In some aspects, CDR1, CDR2 and CDR3 of VH1 and VH2 have at least 90% identity with the corresponding amino acid sequences specified above. In some aspects, CDR1, CDR2 and CDR3 of VH1 and VH3 have at least 90% identity with the corresponding amino acid sequences specified above. In some aspects, CDR1, CDR2 and CDR3 of VH2 and VH3 have at least 90% identity with the corresponding amino acid sequences specified above. In some aspects, CDR1, CDR2 and CDR3 of VH1, VH2 and VH3 have at least 90% identity with the corresponding amino acid sequences specified above. As used herein, “at least 90% identity” includes at least 91%, 92%, 93%, 94%, 95%, 96%, 97%, 98%, 99% and 100% identity to the recited reference sequence. In some aspects, CDR1, CDR2 and CDR3 of VH1 comprise or consist of the corresponding amino acid sequences specified above. In some aspects, CDR1, CDR2 and CDR3 of VH2 comprise or consist of the corresponding amino acid sequences specified above. In some aspects, CDR1, CDR2 and CDR3 of VH3 comprise or consist of the corresponding amino acid sequences specified above. In some aspects, CDR1, CDR2 and CDR3 of VH1 and VH2 comprise or consist of the corresponding amino acid sequences specified above. In some aspects, CDR1, CDR2 and CDR3 of VH1 and VH3 comprise or consist of the corresponding amino acid sequences specified above. In some aspects, CDR1, CDR2 and CDR3 of VH2 and VH3 comprise or consist of the corresponding amino acid sequences specified above. In some aspects, CDR1, CDR2 and CDR3 of VH1, VH2 and VH3 comprise or consist of the corresponding amino acid sequences specified above.

[0867] In some aspects, VL1, VL2 and/or VL3 (e.g., VL1; VL2; VL3; VL1 and VL2; VL1 and VL3; VL2 and VH3; or VL1, VL2 and VL3) comprise a CDR1 comprising an amino acid sequence having at least 80%, at least 85%, at least 90%, at least 91%, at least 92%, at least 93%, at least 94%, at least 95%, at least 96%, at least 97%, at least 98%, at least 99% or 100% identity to SEQ ID NO:589; a CDR2 comprising an amino acid sequence having at least 80%, at least 85%, at least 90%, at least 91%, at least 92%, at least 93%, at least 94%, at least 95%, at least 96%, at least 97%, at least 98%, at least 99% or 100% identity to SEQ ID NO:590; and a CDR3 comprising an amino acid sequence having at least 80%, at least 85%, at least 90%, at least 91%, at least 92%, at least 93%, at least 94%, at least 95%, at least 96%, at least 97%, at least 98%, at least 99% or 100% identity to SEQ ID NO:591. In some aspects, CDR1, CDR2 and CDR3 of VL1 have at least 90% identity with the corresponding amino acid sequences specified above. In some aspects, CDR1, CDR2 and CDR3 of VL2 have at least 90% identity with the corresponding amino acid sequences specified above. In some aspects, CDR1, CDR2 and CDR3 of VL3 have at least 90% identity with the corresponding amino acid sequences specified above. In some aspects, CDR1, CDR2 and CDR3 of VL1 and VL2 have at least 90% identity with the corresponding amino acid sequences specified above. In some aspects, CDR1, CDR2 and CDR3 of VL1 and VL3 have at least 90% identity with the corresponding amino acid sequences specified above. In some aspects, CDR1, CDR2 and CDR3 of VL2 and VL3 have at least 90% identity with the corresponding amino acid sequences specified above. In some aspects, CDR1, CDR2 and CDR3 of VL1, VL2 and VL3 have at least 90% identity with the corresponding amino acid sequences specified above. As used herein, “at least 90% identity” includes at least 91%, 92%, 93%, 94%, 95%, 96%, 97%, 98%, 99% and 100% identity to the recited reference sequence. In some aspects, CDR1, CDR2 and CDR3 of VL1 comprise or consist of the corresponding amino acid sequences specified above. In some aspects, CDR1, CDR2 and CDR3 of VL2 comprise or consist of the corresponding amino acid sequences specified above. In some aspects, CDR1, CDR2 and CDR3 of VL3 comprise or consist of the corresponding amino acid sequences specified above. In some aspects, CDR1, CDR2 and CDR3 of VL1 and VL2 comprise or consist of the corresponding amino acid sequences specified above. In some aspects, CDR1, CDR2 and CDR3 of VL1 and VL3 comprise or consist of the corresponding amino acid sequences specified above. In some aspects, CDR1, CDR2 and CDR3 of VL2 and VL3 comprise or consist of the corresponding amino acid sequences specified above. In some aspects, CDR1, CDR2 and CDR3 of VL1, VL2 and VL3 comprise or consist of the corresponding amino acid sequences specified above.

[0868] In some aspects, VH1, VH2 and/or VH3 (e.g., VH1; V12; VH3; VH1 and V12; VH1 and VH3; VH2 and VH3; or VH1, VH2 and V13) comprise a CDR1 comprising an amino acid sequence having at least 80%, at least 85%, at least 90%, at least 91%, at least 92%, at least 93%, at least 94%, at least 95%, at least 96%, at least 97%, at least 98%, at least 99% or 100% identity to SEQ ID NO:585; a CDR2 comprising an amino acid sequence having at least 80%, at least 85%, at least 90%, at least 91%, at least 92%, at least 93%, at least 94%, at least 95%, at least 96%, at least 97%, at least 98%, at least 99% or 100% identity to SEQ ID NO:586; and a CDR3 comprising an amino acid sequence having at least 80%, at least 85%, at least 90%, at least 91%, at least 92%, at least 93%, at least 94%, at least 95%, at least 96%, at least 97%, at least 98%, at least 99% or 100% identity to SEQ ID NO:587; and VL1, VL2 and/or VL3 (e.g., VL1; VL2; VL3; VL1 and VL2; VL1 and VL3; VL2 and VH3; or VL1, VL2 and VL3) comprise a CDR1 comprising an amino acid sequence having at least 80%, at least 85%, at least 90%, at least 91%, at least 92%, at least 93%, at least 94%, at least 95%, at least 96%, at least 97%, at least 98%, at least 99% or 100% identity to SEQ ID NO:589; a CDR2 comprising an amino acid sequence having at least 80%, at least 85%, at least 90%, at least 91%, at least 92%, at least 93%, at least 94%, at least 95%, at least 96%, at least 97%, at least 98%, at least 99% or 100% identity to SEQ ID NO:590; and a CDR3 comprising an amino acid sequence having at least 80%, at least 85%, at least 90%, at least 91%, at least 92%, at least 93%, at least 94%, at least 95%, at least 96%, at least 97%, at least 98%, at least 99% or 100% identity to SEQ ID NO:591. Any combination of VH1, VH2 and/or VH3 described above may be used in combination with any combination of VL1, VL2 and/or VL3 described above.

[0869] In some aspects, VH1, VH2 and/or VH3 (e.g., VH1; V12; VH3; VH1 and V12; VH1 and VH3; VH2 and VH3; or VH1, VH2 and V13) comprise an amino acid sequence having at least 80%, at least 85%, at least 90%, at least 91%, at least 92%, at least 93%, at least 94%, at least 95%, at least 96%, at least 97%, at least 98%, at least 99% or 100% identity to SEQ ID NO:584. In some aspects, VH1 has at least 90% identity with the corresponding amino acid sequences specified above. In some aspects, VH2 has at least 90% identity with the corresponding amino acid sequences specified above. In some aspects, VH3 has at least 90% identity with the corresponding amino acid sequences specified above. In some aspects, VH1 and VH2 have at least 90% identity with the corresponding amino acid sequences specified above. In some aspects, VH1 and VH3 have at least 90% identity with the corresponding amino acid sequences specified above. In some aspects, VH2 and VH3 have at least 90% identity with the corresponding amino acid sequences specified above. In some aspects, VH1, VH2 and VH3 have at least 90% identity with the corresponding amino acid sequences specified above. As used herein, “at least 90% identity” includes at least 91%, 92%, 93%, 94%, 95%, 96%, 97%, 98%, 99% and 100% identity to the recited reference sequence. In some aspects, VH1 comprises or consists of the corresponding amino acid sequences specified above. In some aspects, VH2 comprises or consists of the corresponding amino acid sequences specified above. In some aspects, VH3 comprises or consists of the corresponding amino acid sequences specified above. In some aspects, VH1 and VH2 comprise or consist of the corresponding amino acid sequences specified above. In some aspects, VH1 and VH3 comprise or consist of the corresponding amino acid sequences specified above. In some aspects VH2 and VH3 comprise or consist of the corresponding amino acid sequences specified above. In some aspects VH1, VH2 and VH3 comprise or consist of the corresponding amino acid sequences specified above.

[0870] In some aspects, VL1, VL2 and/or VL3 (e.g., VL1; VL2; VL3; VL1 and VL2; VL1 and VL3; VL2 and VL3; or VL1, VL2 and VL3) comprise an amino acid sequence having at least 80%, at least 85%, at least 90%, at least 91%, at least 92%, at least 93%, at least 94%, at least 95%, at least 96%, at least 97%, at least 98%, at least 99% or 100% identity to SEQ ID NO:588. In some aspects, VL1 has at least 90% identity with the corresponding amino acid sequences specified above. In some aspects, VL2 has at least 90% identity with the corresponding amino acid sequences specified above. In some aspects, VL3 has at least 90% identity with the corresponding amino acid sequences specified above. In some aspects, VL1 and VL2 have at least 90% identity with the corresponding amino acid sequences specified above. In some aspects, VL1 and VL3 have at least 90% identity with the corresponding amino acid sequences specified above. In some aspects, VL2 and VL3 have at least 90% identity with the corresponding amino acid sequences specified above. In some aspects, VL1, VL2 and VL3 have at least 90% identity with the corresponding amino acid sequences specified above. As used herein, “at least 90% identity” includes at least 91%, 92%, 93%, 94%, 95%, 96%, 97%, 98%, 99% and 100% identity to the recited reference sequence. In some aspects, VL1 comprises or consists of the corresponding amino acid sequences specified above. In some aspects, VL2 comprises or consists of the corresponding amino acid sequences specified above. In some aspects, VL3 comprises or consists of the corresponding amino acid sequences specified above. In some aspects, VL1 and VL2 comprise or consist of the corresponding amino acid sequences specified above. In some aspects, VL1 and VL3 comprise or consist of the-622-corresponding amino acid sequences specified above. In some aspects VL2 and VL3 comprise or consist of the corresponding amino acid sequences specified above. In some aspects VL1, VL2 and VL3 comprise or consist of the corresponding amino acid sequences specified above.

[0871] In some aspects, VH1, VH2 and/or VH3 (e.g., VH1; V12; VH3; VH1 and V12; VH1 and VH3; VH2 and VH3; or VH1, VH2 and V13) comprise an amino acid sequence having at least 80%, at least 85%, at least 90%, at least 91%, at least 92%, at least 93%, at least 94%, at least 95%, at least 96%, at least 97%, at least 98%, at least 99% or 100% identity to SEQ ID NO:584; and VL1, VL2 and/or VL3 (e.g., VL1; VL2; VL3; VL1 and VL2; VL1 and VL3; VL2 and VL3; or VL1, VL2 and VL3) comprise an amino acid sequence having at least 80%, at least 85%, at least 90%, at least 91%, at least 92%, at least 93%, at least 94%, at least 95%, at least 96%, at least 97%, at least 98%, at least 99% or 100% identity to SEQ ID NO:588. Any combination of VH1, VH2 and/or VH3 described above may be used in combination with any combination of VL1, VL2 and/or VL3 described above.

[0872] In some aspects, VH1, VH2 and/or VH3 (e.g., VH1; V12; VH3; VH1 and V12; VH1 and VH3; VH2 and VH3; or VH1, VH2 and V13) comprise a CDR1 comprising an amino acid sequence having at least 80%, at least 85%, at least 90%, at least 91%, at least 92%, at least 93%, at least 94%, at least 95%, at least 96%, at least 97%, at least 98%, at least 99% or 100% identity to SEQ ID NO:593; a CDR2 comprising an amino acid sequence having at least 80%, at least 85%, at least 90%, at least 91%, at least 92%, at least 93%, at least 94%, at least 95%, at least 96%, at least 97%, at least 98%, at least 99% or 100% identity to SEQ ID NO:594; and a CDR3 comprising an amino acid sequence having at least 80%, at least 85%, at least 90%, at least 91%, at least 92%, at least 93%, at least 94%, at least 95%, at least 96%, at least 97%, at least 98%, at least 99% or 100% identity to SEQ ID NO:595. In some aspects, CDR1, CDR2 and CDR3 of VH1 have at least 90% identity with the corresponding amino acid sequences specified above. In some aspects, CDR1, CDR2 and CDR3 of VH2 have at least 90% identity with the corresponding amino acid sequences specified above. In some aspects, CDR1, CDR2 and CDR3 of VH3 have at least 90% identity with the corresponding amino acid sequences specified above. In some aspects, CDR1, CDR2 and CDR3 of VH1 and VH2 have at least 90% identity with the corresponding amino acid sequences specified above. In some aspects, CDR1, CDR2 and CDR3 of VH1 and VH3 have at least 90% identity with the corresponding amino acid sequences specified above. In some aspects, CDR1, CDR2 and CDR3 of VH2 and VH3 have at least 90% identity with the corresponding amino acid sequences specified above. In some aspects, CDR1, CDR2 and CDR3 of VH1, VH2 and VH3 have at least 90% identity with the corresponding amino acid sequences specified above. As used herein, “at least 90% identity” includes at least 91%, 92%, 93%. 94%, 95%, 96%, 97%. 98%, 99% and 100% identity to the recited reference sequence. In some aspects, CDR1, CDR2 and CDR3 of VH1 comprise or consist of the corresponding amino acid sequences specified above. In some aspects, CDR1, CDR2 and CDR3 of VH2 comprise or consist of the corresponding amino acid sequences specified above. In some aspects, CDR1, CDR2 and CDR3 of VH3 comprise or consist of the corresponding amino acid sequences specified above. In some aspects, CDR1, CDR2 and CDR3 of VH1 and VH2 comprise or consist of the corresponding amino acid sequences specified above. In some aspects, CDR1, CDR2 and CDR3 of VH1 and VH3 comprise or consist of the corresponding amino acid sequences specified above. In some aspects, CDR1, CDR2 and CDR3 of VH2 and VH3 comprise or consist of the corresponding amino acid sequences specified above. In some aspects, CDR1, CDR2 and CDR3 of VH1, VH2 and VH3 comprise or consist of the corresponding amino acid sequences specified above.

[0873] In some aspects, VL1, VL2 and/or VL3 (e.g., VL1; VL2; VL3; VL1 and VL2; VL1 and VL3; VL2 and VH3; or VL1, VL2 and VL3) comprise a CDR1 comprising an amino acid sequence having at least 80%, at least 85%, at least 90%, at least 91%, at least 92%, at least 93%, at least 94%, at least 95%, at least 96%, at least 97%, at least 98%, at least 99% or 100% identity to SEQ ID NO:597; a CDR2 comprising an amino acid sequence having at least 80%, at least 85%, at least 90%, at least 91%, at least 92%, at least 93%, at least 94%, at least 95%, at least 96%, at least 97%, at least 98%, at least 99% or 100% identity to SEQ ID NO:598; and a CDR3 comprising an amino acid sequence having at least 80%, at least 85%, at least 90%, at least 91%, at least 92%, at least 93%, at least 94%, at least 95%, at least 96%, at least 97%, at least 98%, at least 99% or 100% identity to SEQ ID NO:599. In some aspects, CDR1, CDR2 and CDR3 of VL1 have at least 90% identity with the corresponding amino acid sequences specified above. In some aspects, CDR1, CDR2 and CDR3 of VL2 have at least 90% identity with the corresponding amino acid sequences specified above. In some aspects, CDR1, CDR2 and CDR3 of VL3 have at least 90% identity with the corresponding amino acid sequences specified above. In some aspects, CDR1, CDR2 and CDR3 of VL1 and VL2 have at least 90% identity with the corresponding amino acid sequences specified above. In some aspects, CDR1, CDR2 and CDR3 of VL1 and VL3 have at least 90% identity with the corresponding amino acid sequences specified above. In some aspects, CDR1, CDR2 and CDR3 of VL2 and VL3 have at least 90% identity with the corresponding amino acid sequences specified above. In some aspects, CDR1, CDR2 and CDR3 of VL1, VL2 and VL3 have at least 90% identity with the corresponding amino acid sequences specified above. As used herein, “at least 90% identity” includes at least 91%, 92%, 93%, 94%, 95%, 96%, 97%, 98%, 99% and 100% identity to the recited reference sequence. In some aspects, CDR1, CDR2 and CDR3 of VL1 comprise or consist of the corresponding amino acid sequences specified above. In some aspects, CDR1, CDR2 and CDR3 of VL2 comprise or consist of the corresponding amino acid sequences specified above. In some aspects, CDR1, CDR2 and CDR3 of VL3 comprise or consist of the corresponding amino acid sequences specified above. In some aspects, CDR1, CDR2 and CDR3 of VL1 and VL2 comprise or consist of the corresponding amino acid sequences specified above. In some aspects, CDR1, CDR2 and CDR3 of VL1 and VL3 comprise or consist of the corresponding amino acid sequences specified above. In some aspects, CDR1, CDR2 and CDR3 of VL2 and VL3 comprise or consist of the corresponding amino acid sequences specified above. In some aspects, CDR1, CDR2 and CDR3 of VL1, VL2 and VL3 comprise or consist of the corresponding amino acid sequences specified above.

[0874] In some aspects, VH1, VH2 and/or VH3 (e.g., VH1; V12; VH3; VH1 and V12; VH1 and VH3; VH2 and VH3; or VH1, VH2 and V13) comprise a CDR1 comprising an amino acid sequence having at least 80%, at least 85%, at least 90%, at least 91%, at least 92%, at least 93%, at least 94%, at least 95%, at least 96%, at least 97%, at least 98%, at least 99% or 100% identity to SEQ ID NO:593; a CDR2 comprising an amino acid sequence having at least 80%, at least 85%, at least 90%, at least 91%, at least 92%, at least 93%, at least 94%, at least 95%, at least 96%, at least 97%, at least 98%, at least 99% or 100% identity to SEQ ID NO:594; and a CDR3 comprising an amino acid sequence having at least 80%, at least 85%, at least 90%, at least 91%, at least 92%, at least 93%, at least 94%, at least 95%, at least 96%, at least 97%, at least 98%, at least 99% or 100% identity to SEQ ID NO:595; and VL1, VL2 and/or VL3 (e.g., VL1; VL2; VL3; VL1 and VL2; VL1 and VL3; VL2 and VH3; or VL1, VL2 and VL3) comprise a CDR1 comprising an amino acid sequence having at least 80%, at least 85%, at least 90%, at least 91%, at least 92%, at least 93%, at least 94%, at least 95%, at least 96%, at least 97%, at least 98%, at least 99% or 100% identity to SEQ ID NO:597; a CDR2 comprising an amino acid sequence having at least 80%, at least 85%, at least 90%, at least 91%, at least 92%, at least 93%, at least 94%, at least 95%, at least 96%, at least 97%, at least 98%, at least 99% or 100% identity to SEQ ID NO:598; and a CDR3 comprising an amino acid sequence having at least 80%, at least 85%, at least 90%, at least 91%, at least 92%, at least 93%, at least 94%, at least 95%, at least 96%, at least 97%, at least 98%, at least 99% or 100% identity to SEQ ID NO:599. Any combination of VH1, VH2 and/or VH3 described above may be used in combination with any combination of VL1, VL2 and/or VL3 described above.

[0875] In some aspects, VH1, VH2 and/or VH3 (e.g., VH1; V12; VH3; VH1 and V12; VH1 and VH3; VH2 and VH3; or VH1, VH2 and V13) comprise an amino acid sequence having at least 80%, at least 85%, at least 90%, at least 91%, at least 92%, at least 93%, at least 94%, at least 95%, at least 96%, at least 97%, at least 98%, at least 99% or 100% identity to SEQ ID NO:592. In some aspects, VH1 has at least 90% identity with the corresponding amino acid sequences specified above. In some aspects, VH2 has at least 90% identity with the corresponding amino acid sequences specified above. In some aspects, VH3 has at least 90% identity with the corresponding amino acid sequences specified above. In some aspects, VH1 and VH2 have at least 90% identity with the corresponding amino acid sequences specified above. In some aspects, VH1 and VH3 have at least 90% identity with the corresponding amino acid sequences specified above. In some aspects, VH2 and VH3 have at least 90% identity with the corresponding amino acid sequences specified above. In some aspects, VH1, VH2 and VH3 have at least 90% identity with the corresponding amino acid sequences specified above. As used herein, “at least 90% identity” includes at least 91%, 92%, 93%, 94%, 95%, 96%, 97%, 98%, 99% and 100% identity to the recited reference sequence. In some aspects, VH1 comprises or consists of the corresponding amino acid sequences specified above. In some aspects, VH2 comprises or consists of the corresponding amino acid sequences specified above. In some aspects, VH3 comprises or consists of the corresponding amino acid sequences specified above. In some aspects, VH1 and VH2 comprise or consist of the corresponding amino acid sequences specified above. In some aspects, VH1 and VH3 comprise or consist of the corresponding amino acid sequences specified above. In some aspects VH2 and VH3 comprise or consist of the corresponding amino acid sequences specified above. In some aspects VH1, VH2 and VH3 comprise or consist of the corresponding amino acid sequences specified above.

[0876] In some aspects, VL1, VL2 and/or VL3 (e.g., VL1; VL2; VL3; VL1 and VL2; VL1 and VL3; VL2 and VL3; or VL1, VL2 and VL3) comprise an amino acid sequence having at least 80%, at least 85%, at least 90%, at least 91%, at least 92%, at least 93%, at least 94%, at least 95%, at least 96%, at least 97%, at least 98%, at least 99% or 100% identity to SEQ ID NO:596. In some aspects, VL1 has at least 90% identity with the corresponding amino acid sequences specified above. In some aspects, VL2 has at least 90% identity with the corresponding amino acid sequences specified above. In some aspects, VL3 has at least 90% identity with the corresponding amino acid sequences specified above. In some aspects, VL1 and VL2 have at least 90% identity with the corresponding amino acid sequences specified above. In some aspects, VL1 and VL3 have at least 90% identity with the corresponding amino acid sequences specified above. In some aspects, VL2 and VL3 have at least 90% identity with the corresponding amino acid sequences specified above. In some aspects, VL1, VL2 and VL3 have at least 90% identity with the corresponding amino acid sequences specified above. As used herein, “at least 90% identity” includes at least 91%, 92%, 93%, 94%, 95%, 96%, 97%, 98%, 99% and 100% identity to the recited reference sequence. In some aspects, VL1 comprises or consists of the corresponding amino acid sequences specified above. In some aspects, VL2 comprises or consists of the corresponding amino acid sequences specified above. In some aspects, VL3 comprises or consists of the corresponding amino acid sequences specified above. In some aspects, VL1 and VL2 comprise or consist of the corresponding amino acid sequences specified above. In some aspects, VL1 and VL3 comprise or consist of the corresponding amino acid sequences specified above. In some aspects VL2 and VL3 comprise or consist of the corresponding amino acid sequences specified above. In some aspects VL1, VL2 and VL3 comprise or consist of the corresponding amino acid sequences specified above.

[0877] In some aspects, VH1, VH2 and/or VH3 (e.g., VH1; V12; VH3; VH1 and V12; VH1 and VH3; VH2 and VH3; or VH1, VH2 and V13) comprise an amino acid sequence having at least 80%, at least 85%, at least 90%, at least 91%, at least 92%, at least 93%, at least 94%, at least 95%, at least 96%, at least 97%, at least 98%, at least 99% or 100% identity to SEQ ID NO:592; and VL1, VL2 and/or VL3 (e.g., VL1; VL2; VL3; VL1 and VL2; VL1 and VL3; VL2 and VL3; or VL1, VL2 and VL3) comprise an amino acid sequence having at least 80%, at least 85%, at least 90%, at least 91%, at least 92%, at least 93%, at least 94%, at least 95%, at least 96%, at least 97%, at least 98%, at least 99% or 100% identity to SEQ ID NO:596. In some aspects, VH1, VH2 and/or VH3 (e.g., VH1; V12; VH3; VH1 and VH2; VH1 and VH3; VH2 and VH3; or VH1, VH2 and V13) comprise an amino acid sequence having at least 90% identity to SEQ ID NO:592; and VL1, VL2 and/or VL3 (e.g., VL1; VL2; VL3; VL1 and VL2; VL1 and VL3; VL2 and VL3; or VL1, VL2 and VL3) comprise an amino acid sequence having at least at least 90% identity to SEQ ID NO:596. Any combination of VH1, VH2 and/or VH3 described above may be used in combination with any combination of VL1, VL2 and/or VL3 described above. As used herein, “at least 90% identity” includes at least 91%, 92%, 93%, 94%, 95%, 96%, 97%, 98%, 99% and 100% identity to the recited reference sequence. In some aspects, VH1, VH2 and/or VH3 (e.g., VH1; V12; VH3; VH1 and V12; VH1 and VH3; VH2 and VH3; or VH1, VH2 and V13) comprise or consist of the amino acid sequence of SEQ ID NO:592; and VL1, VL2 and/or VL3 (e.g., VL1; VL2; VL3; VL1 and VL2; VL1 and VL3; VL2 and VL3; or VL1, VL2 and VL3) comprise or consist of an amino acid sequence of SEQ ID NO:596. Any combination of VH1, VH2 and/or VH3 described above may be used in combination with any combination of VL1, VL2 and/or VL3 described above.

[0878] In some aspects, VH1, VH2 and/or VH3 (e.g., VH1; VH2; VH3; VH1 and VH2; VH1 and VH3; VH2 and VH3; or VH1, VH2 and V13) comprise a CDR1 comprising an amino acid sequence having at least 80%, at least 85%, at least 90%, at least 91%, at least 92%, at least 93%, at least 94%, at least 95%, at least 96%, at least 97%, at least 98%, at least 99% or 100% identity to SEQ ID NO:601; a CDR2 comprising an amino acid sequence having at least 80%, at least 85%, at least 90%, at least 91%, at least 92%, at least 93%, at least 94%, at least 95%, at least 96%, at least 97%, at least 98%, at least 99% or 100% identity to SEQ ID NO:602; and a CDR3 comprising an amino acid sequence having at least 80%, at least 85%, at least 90%, at least 91%, at least 92%, at least 93%, at least 94%, at least 95%, at least 96%, at least 97%, at least 98%, at least 99% or 100% identity to SEQ ID NO:603. In some aspects, CDR1, CDR2 and CDR3 of VH1 have at least 90% identity with the corresponding amino acid sequences specified above. In some aspects, CDR1, CDR2 and CDR3 of VH2 have at least 90% identity with the corresponding amino acid sequences specified above. In some aspects, CDR1, CDR2 and CDR3 of VH3 have at least 90% identity with the corresponding amino acid sequences specified above. In some aspects, CDR1, CDR2 and CDR3 of VH1 and VH2 have at least 90% identity with the corresponding amino acid sequences specified above. In some aspects, CDR1, CDR2 and CDR3 of VH1 and VH3 have at least 90% identity with the corresponding amino acid sequences specified above. In some aspects, CDR1, CDR2 and CDR3 of VH2 and VH3 have at least 90% identity with the corresponding amino acid sequences specified above. In some aspects, CDR1, CDR2 and CDR3 of VH1, VH2 and VH3 have at least 90% identity with the corresponding amino acid sequences specified above. As used herein, “at least 90% identity” includes at least 91%, 92%, 93%, 94%, 95%, 96%, 97%, 98%, 99% and 100% identity to the recited reference sequence. In some aspects, CDR1, CDR2 and CDR3 of VH1 comprise or consist of the corresponding amino acid sequences specified above. In some aspects, CDR1, CDR2 and CDR3 of VH2 comprise or consist of the corresponding amino acid sequences specified above. In some aspects, CDR1, CDR2 and CDR3 of VH3 comprise or consist of the corresponding amino acid sequences specified above. In some aspects, CDR1, CDR2 and CDR3 of VH1 and VH2 comprise or consist of the corresponding amino acid sequences specified above. In some aspects, CDR1, CDR2 and CDR3 of VH1 and VH3 comprise or consist of the corresponding amino acid sequences specified above. In some aspects, CDR1, CDR2 and CDR3 of VH2 and VH3 comprise or consist of the corresponding amino acid sequences specified above. In some aspects, CDR1, CDR2 and CDR3 of VH1, VH2 and VH3 comprise or consist of the corresponding amino acid sequences specified above.

[0879] In some aspects, VL1, VL2 and/or VL3 (e.g., VL1; VL2; VL3; VL1 and VL2; VL1 and VL3; VL2 and VH3; or VL1, VL2 and VL3) comprise a CDR1 comprising an amino acid sequence having at least 80%, at least 85%, at least 90%, at least 91%, at least 92%, at least 93%, at least 94%, at least 95%, at least 96%, at least 97%, at least 98%, at least 99% or 100% identity to SEQ ID NO:605; a CDR2 comprising an amino acid sequence having at least 80%, at least 85%, at least 90%, at least 91%, at least 92%, at least 93%, at least 94%, at least 95%, at least 96%, at least 97%, at least 98%, at least 99% or 100% identity to SEQ ID NO:606; and a CDR3 comprising an amino acid sequence having at least 80%, at least 85%, at least 90%, at least 91%, at least 92%, at least 93%, at least 94%, at least 95%, at least 96%, at least 97%, at least 98%, at least 99% or 100% identity to SEQ ID NO:607. In some aspects, CDR1, CDR2 and CDR3 of VL1 have at least 90% identity with the corresponding amino acid sequences specified above. In some aspects, CDR1, CDR2 and CDR3 of VL2 have at least 90% identity with the corresponding amino acid sequences specified above. In some aspects, CDR1, CDR2 and CDR3 of VL3 have at least 90% identity with the corresponding amino acid sequences specified above. In some aspects, CDR1, CDR2 and CDR3 of VL1 and VL2 have at least 90% identity with the corresponding amino acid sequences specified above. In some aspects, CDR1, CDR2 and CDR3 of VL1 and VL3 have at least 90% identity with the corresponding amino acid sequences specified above. In some aspects, CDR1, CDR2 and CDR3 of VL2 and VL3 have at least 90% identity with the corresponding amino acid sequences specified above. In some aspects, CDR1, CDR2 and CDR3 of VL1, VL2 and VL3 have at least 90% identity with the corresponding amino acid sequences specified above. As used herein, “at least 90% identity” includes at least 91%, 92%, 93%, 94%, 95%, 96%, 97%, 98%, 99% and 100% identity to the recited reference sequence. In some aspects, CDR1, CDR2 and CDR3 of VL1 comprise or consist of the corresponding amino acid sequences specified above. In some aspects, CDR1, CDR2 and CDR3 of VL2 comprise or consist of the corresponding amino acid sequences specified above. In some aspects, CDR1, CDR2 and CDR3 of VL3 comprise or consist of the corresponding amino acid sequences specified above. In some aspects, CDR1, CDR2 and CDR3 of VL1 and VL2 comprise or consist of the corresponding amino acid sequences specified above. In some aspects, CDR1, CDR2 and CDR3 of VL1 and VL3 comprise or consist of the corresponding amino acid sequences specified above. In some aspects, CDR1, CDR2 and CDR3 of VL2 and VL3 comprise or consist of the corresponding amino acid sequences specified above. In some aspects, CDR1, CDR2 and CDR3 of VL1, VL2 and VL3 comprise or consist of the corresponding amino acid sequences specified above.

[0880] In some aspects, VH1, VH2 and/or VH3 (e.g., VH1; V12; VH3; VH1 and V12; VH1 and VH3; VH2 and VH3; or VH1, VH2 and V13) comprise a CDR1 comprising an amino acid sequence having at least 80%, at least 85%, at least 90%, at least 91%, at least 92%, at least 93%, at least 94%, at least 95%, at least 96%, at least 97%, at least 98%, at least 99% or 100% identity to SEQ ID NO:601; a CDR2 comprising an amino acid sequence having at least 80%, at least 85%, at least 90%, at least 91%, at least 92%, at least 93%, at least 94%, at least 95%, at least 96%, at least 97%, at least 98%, at least 99% or 100% identity to SEQ ID NO:602; and a CDR3 comprising an amino acid sequence having at least 80%, at least 85%, at least 90%, at least 91%, at least 92%, at least 93%, at least 94%, at least 95%, at least 96%, at least 97%, at least 98%, at least 99% or 100% identity to SEQ ID NO:603; and VL1, VL2 and/or VL3 (e.g., VL1; VL2; VL3; VL1 and VL2; VL1 and VL3; VL2 and VH3; or VL1, VL2 and VL3) comprise a CDR1 comprising an amino acid sequence having at least 80%, at least 85%, at least 90%, at least 91%, at least 92%, at least 93%, at least 94%, at least 95%, at least 96%, at least 97%, at least 98%, at least 99% or 100% identity to SEQ ID NO:605; a CDR2 comprising an amino acid sequence having at least 80%, at least 85%, at least 90%, at least 91%, at least 92%, at least 93%, at least 94%, at least 95%, at least 96%, at least 97%, at least 98%, at least 99% or 100% identity to SEQ ID NO:606; and a CDR3 comprising an amino acid sequence having at least 80%, at least 85%, at least 90%, at least 91%, at least 92%, at least 93%, at least 94%, at least 95%, at least 96%, at least 97%, at least 98%, at least 99% or 100% identity to SEQ ID NO:607. Any combination of VH1, VH2 and/or VH3 described above may be used in combination with any combination of VL1, VL2 and/or VL3 described above.

[0881] In some aspects, VH1, VH2 and/or VH3 (e.g., VH1; V12; VH3; VH1 and V12; VH1 and VH3; VH2 and VH3; or VH1, VH2 and V13) comprise an amino acid sequence having at least 80%, at least 85%, at least 90%, at least 91%, at least 92%, at least 93%, at least 94%, at least 95%, at least 96%, at least 97%, at least 98%, at least 99% or 100% identity to SEQ ID NO:600. In some aspects, VH1 has at least 90% identity with the corresponding amino acid sequences specified above. In some aspects, VH2 has at least 90% identity with the corresponding amino acid sequences specified above. In some aspects, VH3 has at least 90% identity with the corresponding amino acid sequences specified above. In some aspects, VH1 and VH2 have at least 90% identity with the corresponding amino acid sequences specified above. In some aspects, VH1 and VH3 have at least 90% identity with the corresponding amino acid sequences specified above. In some aspects, VH2 and VH3 have at least 90% identity with the corresponding amino acid sequences specified above. In some aspects, VH1, VH2 and VH3 have at least 90% identity with the corresponding amino acid sequences specified above. In some aspects, VH1 comprises or consists of the corresponding amino acid sequences specified above. In some aspects, VH2 comprises or consists of the corresponding amino acid sequences specified above. In some aspects, VH3 comprises or consists of the corresponding amino acid sequences specified above. In some aspects, VH1 and VH2 comprise or consist of the corresponding amino acid sequences specified above. In some aspects, VH1 and VH3 comprise or consist of the corresponding amino acid sequences specified above. In some aspects VH2 and VH3 comprise or consist of the corresponding amino acid sequences specified above. In some aspects VH1, VH2 and VH3 comprise or consist of the corresponding amino acid sequences specified above.

[0882] In some aspects, VL1, VL2 and/or VL3 (e.g., VL1; VL2; VL3; VL1 and VL2; VL1 and VL3; VL2 and VL3; or VL1, VL2 and VL3) comprise an amino acid sequence having at least 80%, at least 85%, at least 90%, at least 91%, at least 92%, at least 93%, at least 94%, at least 95%, at least 96%, at least 97%, at least 98%, at least 99% or 100% identity to SEQ ID NO:604. In some aspects, VL1 has at least 90% identity with the corresponding amino acid sequences specified above. In some aspects, VL2 has at least 90% identity with the corresponding amino acid sequences specified above. In some aspects, VL3 has at least 90% identity with the corresponding amino acid sequences specified above. In some aspects, VL1 and VL2 have at least 90% identity with the corresponding amino acid sequences specified above. In some aspects, VL1 and VL3 have at least 90% identity with the corresponding amino acid sequences specified above. In some aspects, VL2 and VL3 have at least 90% identity with the corresponding amino acid sequences specified above. In some aspects, VL1, VL2 and VL3 have at least 90% identity with the corresponding amino acid sequences specified above. As used herein, “at least 90% identity” includes at least 91%, 92%, 93%, 94%, 95%, 96%, 97%, 98%, 99% and 100% identity to the recited reference sequence. In some aspects, VL1 comprises or consists of the corresponding amino acid sequences specified above. In some aspects, VL2 comprises or consists of the corresponding amino acid sequences specified above. In some aspects, VL3 comprises or consists of the corresponding amino acid sequences specified above. In some aspects, VL1 and VL2 comprise or consist of the corresponding amino acid sequences specified above. In some aspects, VL1 and VL3 comprise or consist of the corresponding amino acid sequences specified above. In some aspects VL2 and VL3 comprise or consist of the corresponding amino acid sequences specified above. In some aspects VL1, VL2 and VL3 comprise or consist of the corresponding amino acid sequences specified above.

[0883] In some aspects, VH1, VH2 and/or VH3 (e.g., VH1; V12; VH3; VH1 and V12; VH1 and VH3; VH2 and VH3; or VH1, VH2 and V13) comprise an amino acid sequence having at least 80%, at least 85%, at least 90%, at least 91%, at least 92%, at least 93%, at least 94%, at least 95%, at least 96%, at least 97%, at least 98%, at least 99% or 100% identity to SEQ ID NO:600; and VL1, VL2 and/or VL3 (e.g., VL1; VL2; VL3; VL1 and VL2; VL1 and VL3; VL2 and VL3; or VL1, VL2 and VL3) comprise an amino acid sequence having at least 80%, at least 85%, at least 90%, at least 91%, at least 92%, at least 93%, at least 94%, at least 95%, at least 96%, at least 97%, at least 98%, at least 99% or 100% identity to SEQ ID NO:604. Any combination of VH1, VH2 and/or VH3 described above may be used in combination with any combination of VL1, VL2 and/or VL3 described above.

[0884] In some aspects, VH1, VH2 and/or VH3 (e.g., VH1; V12; VH3; VH1 and V12; VH1 and VH3; VH2 and VH3; or VH1, VH2 and V13) comprise a CDR1 comprising an amino acid sequence having at least 80%, at least 85%, at least 90%, at least 91%, at least 92%, at least 93%, at least 94%, at least 95%, at least 96%, at least 97%, at least 98%, at least 99% or 100% identity to SEQ ID NO:617; a CDR2 comprising an amino acid sequence having at least 80%, at least 85%, at least 90%, at least 91%, at least 92%, at least 93%, at least 94%, at least 95%, at least 96%, at least 97%, at least 98%, at least 99% or 100% identity to SEQ ID NO:618; and a CDR3 comprising an amino acid sequence having at least 80%, at least 85%, at least 90%, at least 91%, at least 92%, at least 93%, at least 94%, at least 95%, at least 96%, at least 97%, at least 98%, at least 99% or 100% identity to SEQ ID NO:619. In some aspects, CDR1, CDR2 and CDR3 of VH1 have at least 90% identity with the corresponding amino acid sequences specified above. In some aspects, CDR1, CDR2 and CDR3 of VH2 have at least 90% identity with the corresponding amino acid sequences specified above. In some aspects, CDR1, CDR2 and CDR3 of VH3 have at least 90% identity with the corresponding amino acid sequences specified above. In some aspects, CDR1, CDR2 and CDR3 of VH1 and VH2 have at least 90% identity with the corresponding amino acid sequences specified above. In some aspects, CDR1, CDR2 and CDR3 of VH1 and VH3 have at least 90% identity with the corresponding amino acid sequences specified above. In some aspects, CDR1, CDR2 and CDR3 of VH2 and VH3 have at least 90% identity with the corresponding amino acid sequences specified above. In some aspects, CDR1, CDR2 and CDR3 of VH1, VH2 and VH3 have at least 90% identity with the corresponding amino acid sequences specified above. As used herein, “at least 90% identity” includes at least 91%, 92%, 93%, 94%, 95%, 96%, 97%, 98%, 99% and 100% identity to the recited reference sequence. In some aspects, CDR1, CDR2 and CDR3 of VH1 comprise or consist of the corresponding amino acid sequences specified above. In some aspects, CDR1, CDR2 and CDR3 of VH2 comprise or consist of the corresponding amino acid sequences specified above. In some aspects, CDR1, CDR2 and CDR3 of VH3 comprise or consist of the corresponding amino acid sequences specified above. In some aspects, CDR1, CDR2 and CDR3 of VH1 and VH2 comprise or consist of the corresponding amino acid sequences specified above. In some aspects, CDR1, CDR2 and CDR3 of VH1 and VH3 comprise or consist of the corresponding amino acid sequences specified above. In some aspects, CDR1, CDR2 and CDR3 of VH2 and VH3 comprise or consist of the corresponding amino acid sequences specified above. In some aspects, CDR1, CDR2 and CDR3 of VH1, VH2 and VH3 comprise or consist of the corresponding amino acid sequences specified above.

[0885] In some aspects, VL1, VL2 and/or VL3 (e.g., VL1; VL2; VL3; VL1 and VL2; VL1 and VL3; VL2 and VH3; or VL1, VL2 and VL3) comprise a CDR1 comprising an amino acid sequence having at least 80%, at least 85%, at least 90%, at least 91%, at least 92%, at least 93%, at least 94%, at least 95%, at least 96%, at least 97%, at least 98%, at least 99% or 100% identity to SEQ ID NO:621; a CDR2 comprising an amino acid sequence having at least 80%, at least 85%, at least 90%, at least 91%, at least 92%, at least 93%, at least 94%, at least 95%, at least 96%, at least 97%, at least 98%, at least 99% or 100% identity to SEQ ID NO:622; and a CDR3 comprising an amino acid sequence having at least 80%, at least 85%, at least 90%, at least 91%, at least 92%, at least 93%, at least 94%, at least 95%, at least 96%, at least 97%, at least 98%, at least 99% or 100% identity to SEQ ID NO:623. In some aspects, CDR1, CDR2 and CDR3 of VL1 have at least 90% identity with the corresponding amino acid sequences specified above. In some aspects, CDR1, CDR2 and CDR3 of VL2 have at least 90% identity with the corresponding amino acid sequences specified above. In some aspects, CDR1, CDR2 and CDR3 of VL3 have at least 90% identity with the corresponding amino acid sequences specified above. In some aspects, CDR1, CDR2 and CDR3 of VL1 and VL2 have at least 90% identity with the corresponding amino acid sequences specified above. In some aspects, CDR1, CDR2 and CDR3 of VL1 and VL3 have at least 90% identity with the corresponding amino acid sequences specified above. In some aspects, CDR1, CDR2 and CDR3 of VL2 and VL3 have at least 90% identity with the corresponding amino acid sequences specified above. In some aspects, CDR1, CDR2 and CDR3 of VL1, VL2 and VL3 have at least 90% identity with the corresponding amino acid sequences specified above. As used herein, “at least 90% identity” includes at least 91%, 92%, 93%, 94%, 95%, 96%, 97%, 98%, 99% and 100% identity to the recited reference sequence. In some aspects, CDR1, CDR2 and CDR3 of VL1 comprise or consist of the corresponding amino acid sequences specified above. In some aspects, CDR1, CDR2 and CDR3 of VL2 comprise or consist of the corresponding amino acid sequences specified above. In some aspects, CDR1, CDR2 and CDR3 of VL3 comprise or consist of the corresponding amino acid sequences specified above. In some aspects, CDR1, CDR2 and CDR3 of VL1 and VL2 comprise or consist of the corresponding amino acid sequences specified above. In some aspects, CDR1, CDR2 and CDR3 of VL1 and VL3 comprise or consist of the corresponding amino acid sequences specified above. In some aspects, CDR1, CDR2 and CDR3 of VL2 and VL3 comprise or consist of the corresponding amino acid sequences specified above. In some aspects, CDR1, CDR2 and CDR3 of VL1, VL2 and VL3 comprise or consist of the corresponding amino acid sequences specified above.

[0886] In some aspects, VH1, VH2 and/or VH3 (e.g., VH1; V12; VH3; VH1 and V12; VH1 and VH3; VH2 and VH3; or VH1, VH2 and V13) comprise a CDR1 comprising an amino acid sequence having at least 80%, at least 85%, at least 90%, at least 91%, at least 92%, at least 93%, at least 94%, at least 95%, at least 96%, at least 97%, at least 98%, at least 99% or 100% identity to SEQ ID NO:617; a CDR2 comprising an amino acid sequence having at least 80%, at least 85%, at least 90%, at least 91%, at least 92%, at least 93%, at least 94%, at least 95%, at least 96%, at least 97%, at least 98%, at least 99% or 100% identity to SEQ ID NO:618; and a CDR3 comprising an amino acid sequence having at least 80%, at least 85%, at least 90%, at least 91%, at least 92%, at least 93%, at least 94%, at least 95%, at least 96%, at least 97%, at least 98%, at least 99% or 100% identity to SEQ ID NO:619; and VL1, VL2 and/or VL3 (e.g., VL1; VL2; VL3; VL1 and VL2; VL1 and VL3; VL2 and VH3; or VL1, VL2 and VL3) comprise a CDR1 comprising an amino acid sequence having at least 80%, at least 85%, at least 90%, at least 91%, at least 92%, at least 93%, at least 94%, at least 95%, at least 96%, at least 97%, at least 98%, at least 99% or 100% identity to SEQ ID NO:621; a CDR2 comprising an amino acid sequence having at least 80%, at least 85%, at least 90%, at least 91%, at least 92%, at least 93%, at least 94%, at least 95%, at least 96%, at least 97%, at least 98%, at least 99% or 100% identity to SEQ ID NO:622; and a CDR3 comprising an amino acid sequence having at least 80%, at least 85%, at least 90%, at least 91%, at least 92%, at least 93%, at least 94%, at least 95%, at least 96%, at least 97%, at least 98%, at least 99% or 100% identity to SEQ ID NO:623. Any combination of VH1, VH2 and/or VH3 described above may be used in combination with any combination of VL1, VL2 and/or VL3 described above.

[0887] In some aspects, VH1, VH2 and/or VH3 (e.g., VH1; V12; VH3; VH1 and V12; VH1 and VH3; VH2 and VH3; or VH1, VH2 and V13) comprise an amino acid sequence having at least 80%, at least 85%, at least 90%, at least 91%, at least 92%, at least 93%, at least 94%, at least 95%, at least 96%, at least 97%, at least 98%, at least 99% or 100% identity to SEQ ID NO:616. In some aspects, VH1 has at least 90% identity with the corresponding amino acid sequences specified above. In some aspects, VH2 has at least 90% identity with the corresponding amino acid sequences specified above. In some aspects, VH3 has at least 90% identity with the corresponding amino acid sequences specified above. In some aspects, VH1 and VH2 have at least 90% identity with the corresponding amino acid sequences specified above. In some aspects, VH1 and VH3 have at least 90% identity with the corresponding amino acid sequences specified above. In some aspects, VH2 and VH3 have at least 90% identity with the corresponding amino acid sequences specified above. In some aspects, VH1, VH2 and VH3 have at least 90% identity with the corresponding amino acid sequences specified above. As used herein, “at least 90% identity” includes at least 91%, 92%, 93%, 94%, 95%, 96%, 97%, 98%, 99% and 100% identity to the recited reference sequence. In some aspects, VH1 comprises or consists of the corresponding amino acid sequences specified above. In some aspects, VH2 comprises or consists of the corresponding amino acid sequences specified above. In some aspects, VH3 comprises or consists of the corresponding amino acid sequences specified above. In some aspects, VH1 and VH2 comprise or consist of the corresponding amino acid sequences specified above. In some aspects, VH1 and VH3 comprise or consist of the corresponding amino acid sequences specified above. In some aspects VH2 and VH3 comprise or consist of the corresponding amino acid sequences specified above. In some aspects VH1, VH2 and VH3 comprise or consist of the corresponding amino acid sequences specified above.

[0888] In some aspects, VL1, VL2 and/or VL3 (e.g., VL1; VL2; VL3; VL1 and VL2; VL1 and VL3; VL2 and VL3; or VL1, VL2 and VL3) comprise an amino acid sequence having at least 80%, at least 85%, at least 90%, at least 91%, at least 92%, at least 93%, at least 94%, at least 95%, at least 96%, at least 97%, at least 98%, at least 99% or 100% identity to SEQ ID NO:620. In some aspects, VL1 has at least 90% identity with the corresponding amino acid sequences specified above. In some aspects, VL2 has at least 90% identity with the corresponding amino acid sequences specified above. In some aspects, VL3 has at least 90% identity with the corresponding amino acid sequences specified above. In some aspects, VL1 and VL2 have at least 90% identity with the corresponding amino acid sequences specified above. In some aspects, VL1 and VL3 have at least 90% identity with the corresponding amino acid sequences specified above. In some aspects, VL2 and VL3 have at least 90% identity with the corresponding amino acid sequences specified above. In some aspects, VL1, VL2 and VL3 have at least 90% identity with the corresponding amino acid sequences specified above. As used herein, “at least 90% identity” includes at least 91%, 92%, 93%, 94%, 95%, 96%, 97%, 98%, 99% and 100% identity to the recited reference sequence. In some aspects, VL1 comprises or consists of the corresponding amino acid sequences specified above. In some aspects, VL2 comprises or consists of the corresponding amino acid sequences specified above. In some aspects, VL3 comprises or consists of the corresponding amino acid sequences specified above. In some aspects, VL1 and VL2 comprise or consist of the corresponding amino acid sequences specified above. In some aspects, VL1 and VL3 comprise or consist of the corresponding amino acid sequences specified above. In some aspects VL2 and VL3 comprise or consist of the corresponding amino acid sequences specified above. In some aspects VL1, VL2 and VL3 comprise or consist of the corresponding amino acid sequences specified above.

[0889] In some aspects, VH1, VH2 and/or VH3 (e.g., VH1; V12; VH3; VH1 and V12; VH1 and VH3; VH2 and VH3; or VH1, VH2 and V13) comprise an amino acid sequence having at least 80%, at least 85%, at least 90%, at least 91%, at least 92%, at least 93%, at least 94%, at least 95%, at least 96%, at least 97%, at least 98%, at least 99% or 100% identity to SEQ ID NO:616; and VL1, VL2 and/or VL3 (e.g., VL1; VL2; VL3; VL1 and VL2; VL1 and VL3; VL2 and VL3; or VL1, VL2 and VL3) comprise an amino acid sequence having at least 80%, at least 85%, at least 90%, at least 91%, at least 92%, at least 93%, at least 94%, at least 95%, at least 96%, at least 97%, at least 98%, at least 99% or 100% identity to SEQ ID NO:620. Any combination of VH1, VH2 and/or VH3 described above may be used in combination with any combination of VL1, VL2 and/or VL3 described above.

[0890] In some aspects, VH1, VH2 and/or VH3 (e.g., VH1; V12; VH3; VH1 and V12; VH1 and VH3; VH2 and VH3; or VH1, VH2 and V13) comprise a CDR1 comprising an amino acid sequence having at least 80%, at least 85%, at least 90%, at least 91%, at least 92%, at least 93%, at least 94%, at least 95%, at least 96%, at least 97%, at least 98%, at least 99% or 100% identity to SEQ ID NO:609; a CDR2 comprising an amino acid sequence having at least 80%, at least 85%, at least 90%, at least 91%, at least 92%, at least 93%, at least 94%, at least 95%, at least 96%, at least 97%, at least 98%, at least 99% or 100% identity to SEQ ID NO:610; and a CDR3 comprising an amino acid sequence having at least 80%, at least 85%, at least 90%, at least 91%, at least 92%, at least 93%, at least 94%, at least 95%, at least 96%, at least 97%, at least 98%, at least 99% or 100% identity to SEQ ID NO:611. In some aspects, CDR1, CDR2 and CDR3 of VH1 have at least 90% identity with the corresponding amino acid sequences specified above. In some aspects, CDR1, CDR2 and CDR3 of VH2 have at least 90% identity with the corresponding amino acid sequences specified above. In some aspects, CDR1, CDR2 and CDR3 of VH3 have at least 90% identity with the corresponding amino acid sequences specified above. In some aspects, CDR1, CDR2 and CDR3 of VH1 and VH2 have at least 90% identity with the corresponding amino acid sequences specified above. In some aspects, CDR1, CDR2 and CDR3 of VH1 and VH3 have at least 90% identity with the corresponding amino acid sequences specified above. In some aspects, CDR1, CDR2 and CDR3 of VH2 and VH3 have at least 90% identity with the corresponding amino acid sequences specified above. In some aspects, CDR1, CDR2 and CDR3 of VH1, VH2 and VH3 have at least 90% identity with the corresponding amino acid sequences specified above. As used herein, “at least 90% identity” includes at least 91%, 92%, 93%, 94%, 95%, 96%, 97%, 98%, 99% and 100% identity to the recited reference sequence. In some aspects, CDR1, CDR2 and CDR3 of VH1 comprise or consist of the corresponding amino acid sequences specified above. In some aspects, CDR1, CDR2 and CDR3 of VH2 comprise or consist of the corresponding amino acid sequences specified above. In some aspects, CDR1, CDR2 and CDR3 of VH3 comprise or consist of the corresponding amino acid sequences specified above. In some aspects, CDR1, CDR2 and CDR3 of VH1 and VH2 comprise or consist of the corresponding amino acid sequences specified above. In some aspects, CDR1, CDR2 and CDR3 of VH1 and VH3 comprise or consist of the corresponding amino acid sequences specified above. In some aspects, CDR1, CDR2 and CDR3 of VH2 and VH3 comprise or consist of the corresponding amino acid sequences specified above. In some aspects, CDR1, CDR2 and CDR3 of VH1, VH2 and VH3 comprise or consist of the corresponding amino acid sequences specified above.

[0891] In some aspects, VL1, VL2 and/or VL3 (e.g., VL1; VL2; VL3; VL1 and VL2; VL1 and VL3; VL2 and VH3; or VL1, VL2 and VL3) comprise a CDR1 comprising an amino acid sequence having at least 80%, at least 85%, at least 90%, at least 91%, at least 92%, at least 93%, at least 94%, at least 95%, at least 96%, at least 97%, at least 98%, at least 99% or 100% identity to SEQ ID NO:613; a CDR2 comprising an amino acid sequence having at least 80%, at least 85%, at least 90%, at least 91%, at least 92%, at least 93%, at least 94%, at least 95%, at least 96%, at least 97%, at least 98%, at least 99% or 100% identity to SEQ ID NO:614; and a CDR3 comprising an amino acid sequence having at least 80%, at least 85%, at least 90%, at least 91%, at least 92%, at least 93%, at least 94%, at least 95%, at least 96%, at least 97%, at least 98%, at least 99% or 100% identity to SEQ ID NO:615. In some aspects, CDR1, CDR2 and CDR3 of VL1 have at least 90% identity with the corresponding amino acid sequences specified above. In some aspects, CDR1, CDR2 and CDR3 of VL2 have at least 90% identity with the corresponding amino acid sequences specified above. In some aspects, CDR1, CDR2 and CDR3 of VL3 have at least 90% identity with the corresponding amino acid sequences specified above. In some aspects, CDR1, CDR2 and CDR3 of VL1 and VL2 have at least 90% identity with the corresponding amino acid sequences specified above. In some aspects, CDR1, CDR2 and CDR3 of VL1 and VL3 have at least 90% identity with the corresponding amino acid sequences specified above. In some aspects, CDR1, CDR2 and CDR3 of VL2 and VL3 have at least 90% identity with the corresponding amino acid sequences specified above. In some aspects, CDR1, CDR2 and CDR3 of VL1, VL2 and VL3 have at least 90% identity with the corresponding amino acid sequences specified above. As used herein, “at least 90% identity” includes at least 91%, 92%, 93%, 94%, 95%, 96%, 97%, 98%, 99% and 100% identity to the recited reference sequence. In some aspects, CDR1, CDR2 and CDR3 of VL1 comprise or consist of the corresponding amino acid sequences specified above. In some aspects, CDR1, CDR2 and CDR3 of VL2 comprise or consist of the corresponding amino acid sequences specified above. In some aspects, CDR1, CDR2 and CDR3 of VL3 comprise or consist of the corresponding amino acid sequences specified above. In some aspects, CDR1, CDR2 and CDR3 of VL1 and VL2 comprise or consist of the corresponding amino acid sequences specified above. In some aspects, CDR1, CDR2 and CDR3 of VL1 and VL3 comprise or consist of the corresponding amino acid sequences specified above. In some aspects, CDR1, CDR2 and CDR3 of VL2 and VL3 comprise or consist of the corresponding amino acid sequences specified above. In some aspects, CDR1, CDR2 and CDR3 of VL1, VL2 and VL3 comprise or consist of the corresponding amino acid sequences specified above.

[0892] In some aspects, VH1, VH2 and/or VH3 (e.g., VH1; V12; VH3; VH1 and V12; VH1 and VH3; VH2 and VH3; or VH1, VH2 and V13) comprise a CDR1 comprising an amino acid sequence having at least 80%, at least 85%, at least 90%, at least 91%, at least 92%, at least 93%, at least 94%, at least 95%, at least 96%, at least 97%, at least 98%, at least 99% or 100% identity to SEQ ID NO:609; a CDR2 comprising an amino acid sequence having at least 80%, at least 85%, at least 90%, at least 91%, at least 92%, at least 93%, at least 94%, at least 95%, at least 96%, at least 97%, at least 98%, at least 99% or 100% identity to SEQ ID NO:610; and a CDR3 comprising an amino acid sequence having at least 80%, at least 85%, at least 90%, at least 91%, at least 92%, at least 93%, at least 94%, at least 95%, at least 96%, at least 97%, at least 98%, at least 99% or 100% identity to SEQ ID NO:611; and VL1, VL2 and/or VL3 (e.g., VL1; VL2; VL3; VL1 and VL2; VL1 and VL3; VL2 and VH3; or VL1, VL2 and VL3) comprise a CDR1 comprising an amino acid sequence having at least 80%, at least 85%, at least 90%, at least 91%, at least 92%, at least 93%, at least 94%, at least 95%, at least 96%, at least 97%, at least 98%, at least 99% or 100% identity to SEQ ID NO:613; a CDR2 comprising an amino acid sequence having at least 80%, at least 85%, at least 90%, at least 91%, at least 92%, at least 93%, at least 94%, at least 95%, at least 96%, at least 97%, at least 98%, at least 99% or 100% identity to SEQ ID NO:614; and a CDR3 comprising an amino acid sequence having at least 80%, at least 85%, at least 90%, at least 91%, at least 92%, at least 93%, at least 94%, at least 95%, at least 96%, at least 97%, at least 98%, at least 99% or 100% identity to SEQ ID NO:615. Any combination of VH1, VH2 and/or VH3 described above may be used in combination with any combination of VL1, VL2 and/or VL3 described above.

[0893] In some aspects, VH1, VH2 and/or VH3 (e.g., VH1; V12; VH3; VH1 and V12; VH1 and VH3; VH2 and VH3; or VH1, VH2 and VH3) comprise an amino acid sequence having at least 80%, at least 85%, at least 90%, at least 91%, at least 92%, at least 93%, at least 94%, at least 95%, at least 96%, at least 97%, at least 98%, at least 99% or 100% identity to SEQ ID NO:608. In some aspects, VH1 has at least 90% identity with the corresponding amino acid sequences specified above. In some aspects, VH2 has at least 90% identity with the corresponding amino acid sequences specified above. In some aspects, VH3 has at least 90% identity with the corresponding amino acid sequences specified above. In some aspects, VH1 and VH2 have at least 90% identity with the corresponding amino acid sequences specified above. In some aspects, VH1 and VH3 have at least 90% identity with the corresponding amino acid sequences specified above. In some aspects, VH2 and VH3 have at least 90% identity with the corresponding amino acid sequences specified above. In some aspects, VH1, VH2 and VH3 have at least 90% identity with the corresponding amino acid sequences specified above. As used herein, “at least 90% identity” includes at least 91%, 92%, 93%, 94%, 95%, 96%, 97%, 98%, 99% and 100% identity to the recited reference sequence. In some aspects, VH1 comprises or consists of the corresponding amino acid sequences specified above. In some aspects, VH2 comprises or consists of the corresponding amino acid sequences specified above. In some aspects, VH3 comprises or consists of the corresponding amino acid sequences specified above. In some aspects, VH1 and VH2 comprise or consist of the corresponding amino acid sequences specified above. In some aspects, VH1 and VH3 comprise or consist of the corresponding amino acid sequences specified above. In some aspects VH2 and VH3 comprise or consist of the corresponding amino acid sequences specified above. In some aspects VH1, VH2 and VH3 comprise or consist of the corresponding amino acid sequences specified above.

[0894] In some aspects, VL1, VL2 and/or VL3 (e.g., VL1; VL2; VL3; VL1 and VL2; VL1 and VL3; VL2 and VL3; or VL1, VL2 and VL3) comprise an amino acid sequence having at least 80%, at least 85%, at least 90%, at least 91%, at least 92%, at least 93%, at least 94%, at least 95%, at least 96%, at least 97%, at least 98%, at least 99% or 100% identity to SEQ ID NO:612. In some aspects, VL1 has at least 90% identity with the corresponding amino acid sequences specified above. In some aspects, VL2 has at least 90% identity with the corresponding amino acid sequences specified above. In some aspects, VL3 has at least 90% identity with the corresponding amino acid sequences specified above. In some aspects, VL1 and VL2 have at least 90% identity with the corresponding amino acid sequences specified above. In some aspects, VL1 and VL3 have at least 90% identity with the corresponding amino acid sequences specified above. In some aspects, VL2 and VL3 have at least 90% identity with the corresponding amino acid sequences specified above. In some aspects, VL1, VL2 and VL3 have at least 90% identity with the corresponding amino acid sequences specified above. As used herein, “at least 90% identity” includes at least 91%, 92%, 93%, 94%, 95%, 96%, 97%, 98%, 99% and 100% identity to the recited reference sequence. In some aspects, VL1 comprises or consists of the corresponding amino acid sequences specified above. In some aspects, VL2 comprises or consists of the corresponding amino acid sequences specified above. In some aspects, VL3 comprises or consists of the corresponding amino acid sequences specified above. In some aspects, VL1 and VL2 comprise or consist of the corresponding amino acid sequences specified above. In some aspects, VL1 and VL3 comprise or consist of the corresponding amino acid sequences specified above. In some aspects VL2 and VL3 comprise or consist of the corresponding amino acid sequences specified above. In some aspects VL1, VL2 and VL3 comprise or consist of the corresponding amino acid sequences specified above.

[0895] In some aspects, VH1, VH2 and/or VH3 (e.g., VH1; V12; VH3; VH1 and V12; VH1 and VH3; VH2 and VH3; or VH1, VH2 and V13) comprise an amino acid sequence having at least 80%, at least 85%, at least 90%, at least 91%, at least 92%, at least 93%, at least 94%, at least 95%, at least 96%, at least 97%, at least 98%, at least 99% or 100% identity to SEQ ID NO:608; and VL1, VL2 and/or VL3 (e.g., VL1; VL2; VL3; VL1 and VL2; VL1 and VL3; VL2 and VL3; or VL1, VL2 and VL3) comprise an amino acid sequence having at least 80%, at least 85%, at least 90%, at least 91%, at least 92%, at least 93%, at least 94%, at least 95%, at least 96%, at least 97%, at least 98%, at least 99% or 100% identity to SEQ ID NO:612. Any combination of VH1, VH2 and/or VH3 described above may be used in combination with any combination of VL1, VL2 and/or VL3 described above.

[0896] In some aspects, the antigen is the SARS-CoV-2 protein. In some aspects, the SARS-CoV-2 protein is a membrane protein, nucleocapsid protein, envelope protein, or spike protein. In some aspects, the SARS-CoV-2 protein is a spike protein.

[0897] In some aspects, the SARS-CoV2 virus is a SARS-CoV2 variant.

[0898] In some aspects, the SARS-CoV2 variant is Alpha variant (B.1.1.7), Beta variant (B.1.351), Gamma variant (P.1), Delta variant, Epsilon variant (B.1.427), or Omicron variant (B.1.1.529), or a combination thereof.

[0899] In some aspects, the Omicron variant is BA. 1, BA.2, BA.2.12.1, BA.4, BA.4/5, BA.5, BQ.1, BQ.1.1, BA.2.75, BA.2.75.2, BA.4.6, BQ.1.1, BJ.1, XBB, XBB1.5, BF.7, CH.1.1, or a combination thereof.

[0900] In some aspects, any VH and/or VL pair may be deglycosylated of high mannose sugars present on an amino acid or amino acids in the VH and/or VL sequence. Site specific mutation may be performed to replace the glycosylated amino acid with a deglycosylated amino acid substitute.

[0901] In some aspects, an antigen binding polypeptide or antigen binding polypeptide complex provided herein has a pI of from about 7 to about 9, from about 7 to about 8, or from about 8 to about 9. In some aspects, an antigen binding polypeptide or antigen binding polypeptide complex provided herein has a pI of about 7, about 7.5, about 8, about 8.5 or about 9. In some aspects, an antigen binding polypeptide or antigen binding polypeptide complex provided herein has a pI of about 6.92, about 6.99, about 6.73, about 8.36, about 7.8, or about 7.92. In some aspects, an antigen binding polypeptide or antigen binding polypeptide complex provided herein has a pI of at least about 7 or at least about 8.

[0902] In some aspects, an antigen binding polypeptide or antigen binding polypeptide complex provided herein does not precipitate.

[0903] In some aspects, an antigen binding polypeptide or antigen binding polypeptide complex provided herein has a concentration of at least 80 μg/mL in the blood up to about 7 days after infusion (e.g., at 1, 2, 3, 4, 5, 6 or 7 days) of the polypeptide or complex to a subject. In some aspects, an antigen binding polypeptide or antigen binding polypeptide complex provided herein has a concentration of from about 80 μg/mL to about 95 μg/mL in the blood up to about 7 days after infusion (e.g., at 1, 2, 3, 4, 5, 6 or 7 days) of the polypeptide or complex to a subject. In some aspects, an antigen binding polypeptide or antigen binding polypeptide complex provided herein has a concentration of about 80 g/mL, about 85 μg/mL, about 90 μg/mL or about 95 μg/mL in the blood up to about 7 days after infusion (e.g., at 1, 2, 3, 4, 5, 6 or 7 days) of the polypeptide or complex to a subject.

[0904] In some aspects, an antigen binding polypeptide or antigen binding polypeptide complex provided herein has a concentration of at least about 5 μg/mL in the blood at from about 14 days to about 21 days (e.g., 14, 15, 16, 18, 18, 19, 20 or 21 days) after infusion of the polypeptide or complex to a subject. In some aspects, an antigen binding polypeptide or antigen binding polypeptide complex provided herein has a concentration of from about 5 μg/mL to about 30 μg/mL in the blood at from about 14 days to about 21 days (e.g., 14, 15, 16, 18, 18, 19, 20 or 21 days) after infusion of the polypeptide or complex to a subject. In some aspects, an antigen binding polypeptide or antigen binding polypeptide complex provided herein has a concentration of from about 5 ug/mL, about g/mL, about 15 μg/mL, about 20 μg/mL, about 25 μg/mL or to about 30 μg/mL in the blood at from about 14 days to about 21 days (e.g., 14, 15, 16, 18, 18, 19, 20 or 21 days) after infusion of the polypeptide or complex to a subject.

[0905] In some aspects, an antigen binding polypeptide or antigen binding polypeptide complex provided herein has advantages over a monoclonal antibody or a combination of monoclonal antibodies binding to the same target as the antigen binding polypeptide or antigen binding polypeptide complex. For example, in some aspects, an antigen binding polypeptide or antigen binding polypeptide complex provided herein targets different sites on a SARS-CoV-2 protein. In some aspects, an antigen binding polypeptide or antigen binding polypeptide complex provided herein has synergistic neutralization of a SARS-CoV-2 virus. In some aspects, an antigen binding polypeptide or antigen binding polypeptide complex provided herein has cross coverage of antigenic variants of a SARS-CoV-2 virus. In some aspects, an antigen binding polypeptide or antigen binding polypeptide complex provided herein minimizes SARS-CoV-2 escape. In some aspects, an antigen binding polypeptide or antigen binding polypeptide complex provided herein remains therapeutically effective despite SARS-CoV-2 evolution.

### Amino Acid Linkers

[0906] In some aspects, an antigen binding polypeptide or polypeptide complex (e.g., an antibody or antigen binding fragment thereof) provided herein comprises one or more amino acid linkers between two or more regions of the antigen binding polypeptide or polypeptide complex.

[0907] As used herein, an “amino acid linker” can be a single amino acid or short amino acid sequence that is capable of joining two regions of an antigen binding polypeptide or polypeptide complex provided herein in a stable manner that maintains or promotes a function associated with the regions. However, as used herein, an “amino acid linker” can also include where an amino acid linker is not present between two regions (referred to herein as an amino acid linker having 0 amino acids). In some aspects, an amino acid linker is represented herein in a structure of an antigen binding polypeptide or polypeptide complex by the abbreviation “l” or “L” and a number (e.g., L1 to denote a first linker, L2 to denote a second linker, L3 to denote a third linker, L4 to denote a fourth linker, L5 to denote a fifth linker, L6 to denote a sixth linker, L7 to denote a seventh linker, L8 to denote an eighth linker, and so on). In some aspects, such enumerated amino acid linkers (e.g., L1) can have the same or different sequence as any other enumerated amino acid linker (e.g., L2, etc.).

[0908] In some aspects, an amino acid linker has a length of from 0 amino acids (i.e., an amino acid linker is not present) to about 50 amino acids (e.g., one or more of L1, L2, L3, L4, L5, L6, L7, L8, L9, L10, L11, L12, L13, L14, L15, L16, L17, L18, L19, L20, etc. to L48 or more of a first and/or second polypeptide of an antigen binding polypeptide or polypeptide complex structure provided herein). In some aspects, the amino acid linker has a length of from 0 amino acids to about 45 amino acids, 0 amino acids to about 40 amino acids, 0 amino acids to about 35 amino acids, 0 amino acids to about 30 amino acids, 0 amino acids to about 25 amino acids, 0 amino acids to about 20 amino acids, 0 amino acids to about 15 amino acids, 0 amino acids to about 10 amino acids, 0 amino acids to about 5 amino acids, about 1 amino acid to about 45 amino acids, about 1 amino acid to about 40 amino acids, about 1 amino acid to about 35 amino acids, about 1 amino acid to about 30 amino acids, about 1 amino acid to about 25 amino acids, about 1 amino acid to about 20 amino acids, 1 amino acid to about 15 amino acids, about 1 amino acid to about 10 amino acids, about 1 amino acid to about 5 amino acids, about 5 amino acids to about 50 amino acids, about 5 amino acids to about 45 amino acids, about 5 amino acids to about 40 amino acids, about 5 amino acids to about 35 amino acids, about 5 amino acids to about 30 amino acids, about 5 amino acids to about 25 amino acids, about 5 amino acids to about 20 amino acids, about 5 amino acids to about 15 amino acids, about 5 amino acids to about 10 amino acids, about 10 amino acids to about 50 amino acids, about 10 amino acids to about 45 amino acids, about 10 amino acids to about 40 amino acids, about 10 amino acids to about 35 amino acids, about 10 amino acids to about 30 amino acids, about 10 amino acids to about 25 amino acids, about 10 amino acids to about 20 amino acids, about 10 amino acids to about 15 amino acids, about 15 amino acids to about 50 amino acids, about 15 amino acids to about 45 amino acids, about 15 amino acids to about 40 amino acids, about 15 amino acids to about 35 amino acids, about 15 amino acids to about 30 amino acids, about 15 amino acids to about 25 amino acids, about 15 amino acids to about 20 amino acids, about 20 amino acids to about 50 amino acids, about 20 amino acids to about 45 amino acids, about 20 amino acids to about 40 amino acids, about 20 amino acids to about 35 amino acids, about 20 amino acids to about 30 amino acids, about 20 amino acids to about 25 amino acids, about 25 amino acids to about 50 amino acids, about 25 amino acids to about 45 amino acids, about 25 amino acids to about 40 amino acids, about 25 amino acids to about 35 amino acids, about 25 amino acids to about 30 amino acids, about 30 amino acids to about 50 amino acids, about 30 amino acids to about 45 amino acids, about 30 amino acids to about 40 amino acids, about 30 amino acids to about 35 amino acids, about 40 amino acids to about 50 amino acids, about 40 amino acids to about 45 amino acids, or about 45 amino acids to about 50 amino acids

[0909] In some aspects, the amino acid linker has 0 amino acids (i.e., an amino acid linker is not present) or about 1, about 2, about 3, about 4, about 5, about 6, about 7, about 8, about 9, about 10, about 11, about 12, about 13, about 14, about 15, about 16, about 17, about 18, about 19, about 20, about 25, about 30, about 35, about 40, about 45, or about 50 amino acids (e.g., one or more of L1, L2, L3, L4, L5, L6, L7, L8, L9, L10, L11, L12, L13, L14, L15, L16, L17, L18, L19, L20, etc. to L48 or more of a first and/or second polypeptide of an antigen binding polypeptide or polypeptide complex structure provided herein).

[0910] In some aspects, the amino acid linker consists of one or more amino acid residues (e.g., one or more of L1, L2, L3, L4, L5, L6, L7, L8, L9, L10, L11, L12, L13, L14, L15, L16, L17, L18, L19, L20, etc. to L48 or more of a first and/or second polypeptide of an antigen binding polypeptide or polypeptide complex structure provided herein). In some aspects, the amino acid residues are selected from the group consisting of glycine, alanine, serine, threonine, cysteine, asparagine, glutamine, leucine, isoleucine, valine, proline, histidine, aspartic acid, glutamic acid, lysine, arginine, methionine, phenylalanine, tryptophan, and tyrosine.

[0911] In some aspects, an amino acid linker is non-immunogenic. In some aspects, a non-immunogenic linker consists of serine, glycine and/or alanine residues, or consists of serine and/or glycine residues. In some aspects, an amino acid linker does not contain a T cell epitope or consensus T cell epitope.

[0912] In some aspects, an amino acid linker consists of one or more residues of alanine, cysteine, glycine, isoleucine, leucine, methionine, phenylalanine, proline, tryptophan, tyrosine, or valine (e.g., one or more of L1, L2, L3, L4, L5, L6, L7, L8, L9, L10, L11, L12, L13, L14, L15, L16, L17, L18, L19, L20, etc. to L48 or more of a first and/or second polypeptide of an antigen binding polypeptide or polypeptide complex structure provided herein).

[0913] Amino acid linker sequences that can be used with the antigen binding polypeptides or polypeptide complexes (e.g., an antibody or antigen binding fragment thereof) provided herein are well known and can be incorporated into the antigen binding polypeptides and polypeptide complexes provided herein using routine molecular biology and recombinant DNA techniques. See, e.g., Chen et al., Adv Drug Deliv Rev., 65(10):1357-1369, 2013; and Chichili et al., Protein Sci., 22(2):153-167, 2013.

[0914] In some aspects, an amino acid linker (e.g., one or more of L1, L2, L3, L4, L5, L6, L7, L8, L9, L10, L11, L12, L13, L14, L15, L16, L17, L18, L19, L20, etc. to L48 or more of an antigen binding polypeptide or first and/or second polypeptide of an antigen binding polypeptide complex structure provided herein) comprises an amino acid sequence having at least 80%, at least 85%, at least 90%, at least 91%, at least 92%, at least 93%, at least 94%, at least 95%, at least 96%, at least 97%, at least 98%, at least 99% or 100% identity to any one of SEQ ID NOs:1-34, wherein SEQ ID NO:1 has the amino acid sequence of G, SEQ ID NO:2 has the amino acid sequence of A, SEQ ID NO:3 has the amino acid sequence of GSS and SEQ ID NO:4 has the amino acid sequence of ASG.

[0915] In some aspects, the amino acid linker between VL1 and VL2 comprises an amino acid sequence having at least 80%, at least 85%, at least 90%, at least 91%, at least 92%, at least 93%, at least 94%, at least 95%, at least 96%, at least 97%, at least 98%, at least 99% or 100% identity to SEQ ID NO:6.

[0916] In some aspects, the amino acid linker between VL2 and VH2 comprises an amino acid sequence having at least 80%, at least 85%, at least 90%, at least 91%, at least 92%, at least 93%, at least 94%, at least 95%, at least 96%, at least 97%, at least 98%, at least 99% or 100% identity to SEQ ID NO:27.

[0917] In some aspects, the amino acid linker between VH2 and VH1 comprises an amino acid sequence having at least 80%, at least 85%, at least 90%, at least 91%, at least 92%, at least 93%, at least 94%, at least 95%, at least 96%, at least 97%, at least 98%, at least 99% or 100% identity to SEQ ID NO:6.

[0918] In some aspects, the amino acid linker between VH1 and Fc comprises an amino acid sequence having at least 80%, at least 85%, at least 90%, at least 91%, at least 92%, at least 93%, at least 94%, at least 95%, at least 96%, at least 97%, at least 98%, at least 99% or 100% identity to SEQ ID NO:12.

[0919] In some aspects, the amino acid linker between VL1 and VL2 comprises an amino acid sequence having at least 80%, at least 85%, at least 90%, at least 91%, at least 92%, at least 93%, at least 94%, at least 95%, at least 96%, at least 97%, at least 98%, at least 99% or 100% identity to SEQ ID NO:6; the amino acid linker between VL2 and VH2 comprises an amino acid sequence having at least 80%, at least 85%, at least 90%, at least 91%, at least 92%, at least 93%, at least 94%, at least 95%, at least 96%, at least 97%, at least 98%, at least 99% or 100% identity to SEQ ID NO:27; the amino acid linker between VH2 and VH1 comprises an amino acid sequence having at least 80%, at least 85%, at least 90%, at least 91%, at least 92%, at least 93%, at least 94%, at least 95%, at least 96%, at least 97%, at least 98%, at least 99% or 100% identity to SEQ ID NO:6; and the amino acid linker between VH1 and Fc comprises an amino acid sequence having at least 80%, at least 85%, at least 90%, at least 91%, at least 92%, at least 93%, at least 94%, at least 95%, at least 96%, at least 97%, at least 98%, at least 99% or 100% identity to SEQ ID NO:12.

[0920] In some aspects, the amino acid linker between CL and CH1 comprises an amino acid sequence having at least 80%, at least 85%, at least 90%, at least 91%, at least 92%, at least 93%, at least 94%, at least 95%, at least 96%, at least 97%, at least 98%, at least 99% or 100% identity to SEQ ID NO:27.

[0921] In some aspects, the amino acid linker between VL1 and VL2 comprises an amino acid sequence having at least 80%, at least 85%, at least 90%, at least 91%, at least 92%, at least 93%, at least 94%, at least 95%, at least 96%, at least 97%, at least 98%, at least 99% or 100% identity to SEQ ID NO:6; the amino acid linker between VL2 and VH2 comprises an amino acid sequence having at least 80%, at least 85%, at least 90%, at least 91%, at least 92%, at least 93%, at least 94%, at least 95%, at least 96%, at least 97%, at least 98%, at least 99% or 100% identity to SEQ ID NO:27; the amino acid linker between VH2 and VH1 comprises an amino acid sequence having at least 80%, at least 85%, at least 90%, at least 91%, at least 92%, at least 93%, at least 94%, at least 95%, at least 96%, at least 97%, at least 98%, at least 99% or 100% identity to SEQ ID NO:6; and the amino acid linker between CL and CH1 comprises an amino acid sequence having at least 80%, at least 85%, at least 90%, at least 91%, at least 92%, at least 93%, at least 94%, at least 95%, at least 96%, at least 97%, at least 98%, at least 99% or 100% identity to SEQ ID NO:27.

[0922] In some aspects, the amino acid linker between CH1 and Fc comprises 0 amino acids.

[0923] In some aspects, the amino acid linker between VL1 and VL2 comprises an amino acid sequence having at least 80%, at least 85%, at least 90%, at least 91%, at least 92%, at least 93%, at least 94%, at least 95%, at least 96%, at least 97%, at least 98%, at least 99% or 100% identity to SEQ ID NO:6; the amino acid linker between VL2 and VH2 comprises an amino acid sequence having at least 80%, at least 85%, at least 90%, at least 91%, at least 92%, at least 93%, at least 94%, at least 95%, at least 96%, at least 97%, at least 98%, at least 99% or 100% identity to SEQ ID NO:27; the amino acid linker between VH2 and VH1 comprises an amino acid sequence having at least 80%, at least 85%, at least 90%, at least 91%, at least 92%, at least 93%, at least 94%, at least 95%, at least 96%, at least 97%, at least 98%, at least 99% or 100% identity to SEQ ID NO:6; and the amino acid linker between CL and CH1 comprises an amino acid sequence having at least 80%, at least 85%, at least 90%, at least 91%, at least 92%, at least 93%, at least 94%, at least 95%, at least 96%, at least 97%, at least 98%, at least 99% or 100% identity to SEQ ID NO:27; and the amino acid linker between CH1 and Fc comprises 0 amino acids.

[0924] In some aspects, the SARS-CoV-2 of the SARS-CoV-2 protein to which an antigen binding polypeptide or polypeptide complex provided herein specifically binds is a variant of concern (VOC). In some aspects, the SARS-CoV-2 of the SARS-CoV-2 protein to which an antigen binding polypeptide or polypeptide complex provided herein specifically binds is a variant under monitoring (e.g., variant with genetic changes suspected to affect virus characteristics and some indication of posing a future risk, but further studies are needed).

[0925] In some aspects, the SARS-CoV-2 of the SARS-CoV-2 protein to which an antigen binding polypeptide or polypeptide complex provided herein specifically binds is a Lambda (C.37), Mu (B.1.621), Epsilon (B.1.429, B.1.427, CAL.20C), Zeta (P.2), Eta (B.1.525), Theta (P.3), Iota (B.1.526), or Kappa (B.1.617.1) variant, or a combination thereof. In some aspects, the SARS-CoV-2 of the SARS-CoV-2 protein to which an antigen binding polypeptide or polypeptide complex provided herein specifically binds is a AZ.5, C.1.2, B.1.617.1, B.1.526, B.1.525, B.1.630, B.1.640, AV.1, AT.1, R.1, B.1.466.2, B.1.1.519, C.36.3, B.1.214.2, B.1.427, B.1.429, B.1.1.523, B.1.619, B.1.620, B.1.1.207, B.1.1.317, B.1.616, B.1.618, or B.1.640.2 variant, or a combination thereof.

[0926] In some aspects, the SARS-CoV-2 of the SARS-CoV-2 protein to which an antigen binding polypeptide or polypeptide complex provided herein specifically binds is an Alpha (B.1.1.7), Beta (B.1.351), Gamma (P.1), Delta (B.1.617.2), or Omicron (B.1.1.529) variant, or a combination thereof. In some aspects, the Omicron variant is BA.1, BA.2, BA.2.12.1, BA.4, BA.4/5, BA.5, BQ.1, BQ.1.1, BA.2.75, BA.2.75.2, BA.4.6, BQ.1.1, BJ.1, XBB, XBB1.5, BF.7, CH.1.1, or a combination thereof.

[0927] In some aspects, the SARS-CoV-2 protein has an amino acid mutation of one or more of the following: F2L, L5F, L51, V6F, L7V, P9L, S12C, S13I, Q14H, C15F, N17K, L18F, T20I, T22N, T22A, T22I, Q23K, P25S, A27S, A27V, T29I, F32L, R34C, H49Y, S50L, T51I, Q52L, Q52H, L54F, L54W, F55I, P57L, H69Y, S71F, G72V, T73I, G75V, T76I, F79L, D80N, D80Y, N87Y, D88N, D88E, D88Y, D88A, V90F, T95A, T95I, E96D, K97T, S98F, R1021, 1105L, D111N, K113R, L118F, V130A, E132D, C136R, D138H, L141-, L141F, G142V, G142-, V143F, V143-, Y144-, Y144V, Y145H, H146Y, K147E, N148S, S151I, W152C, M153T, M153V, M153I, E154V, F157L, R158S, L176F, M177I, D178N, G181V, L189F, R190K, I203M, I210-, R214L, D215Y, D215G, L216F, Q218L, F220L, S221L, A222V, A222P, D228H, L229F, Q239R, T240I, L242F, A243S, A243V, H245R, H245Y, R246K, D253Y, D253G, S254F, S256L, W258L, G261V, G261R, A262S, Y265C, V267L, R273S, E281Q, A288S, L293V, D294E, P295S, E298G, T307I, V308L, E309Q, Q314K, Q314L, Q314H, T315I, Q321L, T323I, P330S, A344S, T345S, A348T, A348S, N354K, R357K, V367F, V382L, P384L, V395I, R403K, V407I, A411S, G413R, K417T, N439K, N440K, L441I, G446V, R457K, K458Q, G476S, S477N, P479L, V483A, E484Q, E484K, Q493L, S494P, L452R, Y453F, Y508H, N501Y, H519Q, A520S, A522V, K529E, G545S, T547I, L552F, T553I, E554D, K558N, A570V, T572I, D574Y, E583D, I584V, S5961, 1598V, N603H, Q613H, D614G, V615F, T618A, P621S, V622F, V622I, V622A, A623S, H625Y, A626V, P631S, W633R, G639V, S640F, A647S, A647V, E654Z, E654K, H655Y, N658Y, A668S, A672V, Q675R, Q675H, T676S, T676I, Q677H, Q677R, T678I, P681L, P681R, P681H, R682W, A684S, A684T, V687L, A688V, A688S, S689I, S691F, S698L, N703D, S704L, V705F, A706V, I714M, T716I, I720V, T724A, M7311, T732A, T732I, G744V, D745G, N751D, L754F, R765S, R765H, T768I, G769A, A771S, T778I, Q779H, E780Q, A783S, D808V, D808G, P809S, I818V, L822F, D830H, D830Y, Q836P, Q836L, G838D, A845S, A845D, A845V, A845D, A845S, A846V, R847I, K854R, N856S, T859I, D867N, A879V, A879S, F888L, A893E, A893V, E918V, L922F, A924S, A924V, S929I, D936H, D936Y, L938F, S939F, T941I, G946V, A958S, N969S, L981F, T1006I, V1008T, T1009I, A1016S, A1020V, F1052L, P1053T, L1063F, V1065L, A1070V, Q1071H, E1072V, K1073N, A1078V, A1078S, G1085R, K1086N, R1091L, H1101Y, V1104L, P1112L, D1118Y, Ti 1201, V1122L, S1123P, G1124V, G1124C, V1129A, I1130M, T1136I, D1139H, L1141F, D1146H, S1147L, D1153Y, P1162Q, P1162S, P1162Q, P1162S, D1163Y, G1167V, D1168H, V1176F, N1187Y, K1191N, N1192T, E1195Q, L1203F, K1205N, E1207A, 1219 V, G1219S, I1221T, V1228L, M1229I, V1230L, T1231I, T1231A, C1235F, M1237I, M1237V, M1237T, T1238I, K1245N, C1247F, G1251R, D1259H, S1261F, P1263L, V1264L, a deletion of residues 69 and 70, a deletion of residues 246-252 and D253N, or a combination thereof.

[0928] In some aspects, the SARS-CoV-2 protein is a membrane protein, nucleocapsid protein, envelope protein, or spike protein, or a combination thereof. In some aspects, the SARS-CoV-2 protein is a spike protein.

[0929] In some aspects, an antigen binding polypeptide complex provided herein has greater neutralization potency against SARS-CoV-2 virus than a monospecific antigen binding polypeptide complex that specifically binds to one of the same antigens. In some aspects, an antigen binding polypeptide complex provided herein is bispecific, trispecific or tetraspecific and has greater neutralization potency against SARS-CoV-2 virus than a monospecific antigen binding polypeptide complex that specifically binds to one of the same antigens the bispecific, trispecific or tetraspecific antigen binding polypeptide complex.

[0930] In some aspects, an antigen binding polypeptide complex provided herein has greater neutralization potency against SARS-CoV-2 virus than a mixture of monospecific antigen binding polypeptide complexes that specifically bind to the same antigens. In some aspects, an antigen binding polypeptide complex provided herein is bispecific, trispecific or tetraspecific and has greater neutralization potency against SARS-CoV-2 virus than a mixture of monospecific antigen binding polypeptide complexes that specifically bind to the same antigens as the bispecific, trispecific or tetraspecific antigen binding polypeptide complex.

### Modifications

[0931] In some aspects, an antigen binding polypeptide or polypeptide complex (e.g., an antibody or antigen binding fragment thereof) provided herein comprises an effector function mutation or half-life extension mutation.

[0932] Effector functions are an important part of the humoral immune response and form an link between innate and adaptive immunity. Most effector functions are induced via the Fc region of an antibody, which can interact with complement proteins and specialized Fc receptors. As used herein, an “effector function mutation” or “Fc effector function mutation” refer to a change in the amino acid sequence, typically in the Fc region, which can increase or decrease effector function, for example, increase binding affinity of Fc for specific Fc receptors, or increase antibody-dependent cellular cytotoxicity (ADCC) activity.

[0933] “Half-life” of a pharmaceutically active substance is the time it takes for the amount of the substance, once administered to the body, to reduce by half A “half-life extension mutation” of an antigen binding polypeptide or polypeptide complex provided herein refers to a change in the amino acid sequence, typically in the Fc region, which increases the half-life of the antigen binding polypeptide or polypeptide complex (e.g., by increasing Fc receptor binding affinity, slowing off-rate for Fc and Fc receptors, and/or increased sialylation).

[0934] Examples of Fc effector function mutations that decrease or knockout function include, but are not limited to, the following substitutions in the Fc region, based on the EU numbering scheme: L234A, L235A, P239A, N297A, or a combination thereof.

[0935] Examples of Fc effector function mutations that increase function include, but are not limited to, the following substitutions in the Fc region, based on the EU numbering scheme: S298A/E333A/K334A, S239D/I332E, S239D/A330L/I332E, G236A/S239D/I332E, or a combination thereof.

[0936] Additional examples of effector function mutations, half-life extension mutations and methods for incorporating the same into an amino acid sequence are known and described, for example, in Saunders, “Conceptual Approaches to Modulating Antibody Effector Functions and Circulation Half-Life,” Front. Immunol. Jun. 7, 2019; U.S. Pat. No. 8,546,543, and U.S. Pub. No. 2020/0054765.

[0937] In some aspects, an antigen binding polypeptide or polypeptide complex (e.g., an antibody or antigen binding fragment thereof) provided herein comprises one or more knob-into-hole modifications.

[0938] The term “knob-into-hole modification,” as used herein, refers to a genetic modification that directs the pairing of two polypeptides to promote heterodimerization. In some aspects, the modification introduces a protuberance (knob) into one polypeptide and a cavity (hole) into the other polypeptide at an interface in which the two polypeptides interact. In some aspects, a knob-into-hole modification can be created by introducing only a hole modification, for example, by replacing an amino acid residue with a smaller side chain than the original amino acid residue (e.g., a substitution of one or more serine, threonine, valine or alanine residues, or a combination thereof). In some aspects, a knob-into-hole modification can be created by introducing only a knob modification, for example, by replacing an amino acid residue with a larger side chain than the original amino acid residue (e.g., a substitution of one or more tryptophan or tyrosine residues, or a combination thereof).

[0939] In some aspects, the knob-into-hole modification is in the binding interface of two Fc regions, the binding interface of two CH2 regions, the binding interface of two CH3 regions, the binding interface of a CL region and a CH1 region, or the binding interface of a VH region and a VL region. See, e.g., U.S. Pub. No. 2007/0178552, Int'l Pub. No. WO 96/027011, Int'l Pub. No. WO 98/050431 and Zhu et al., Protein Science 6:781-788, 1987.

[0940] In some aspects, the antigen binding polypeptide or polypeptide complex comprises one, two, three, four, five, six, seven, eight, nine, ten, or more knob-into-hole modifications.

[0941] Knob-into-hole modifications are well known and can be incorporated into antigen binding polypeptides and polypeptide complexes provided herein using routine molecular biology and recombinant DNA techniques. See, e.g., U.S. Pub. No. 2003/0078385; Int'l Pub. No. WO 96/027011; Ridgway et al., Protein Eng., 9:617-621, 1996; and Merchant et al., Nat. Biotechnol., 16:677-681, 1998.

[0942] In some aspects, the knob-into-hole modification is an amino acid substitution. As used herein, such a substitution is described based on the EU numbering scheme of Kabat, which corresponds to the numbering in the Protein Data Bank (PDB).

[0943] In some aspects, the knob-into-hole modifications are M428L and N434S or N434A, based on the EU numbering scheme. In some aspects, the knob-into-hole modifications are M428L and N424S, based on the EU numbering scheme. In some aspects, the knob-into-hole modification is N434A, based on the EU numbering scheme.

[0944] In some aspects, the knob-into-hole modification is a knob substitution of S354C and/or T366W, based on the EU numbering scheme. In some aspects, the knob-into-hole modification is a knob substitution of S354C, T366W, M428L and N434S, or N434A based on the EU numbering scheme.

[0945] In some aspects, the knob-into-hole modification is a hole substitution of Y349C, T366S, L368A, Y407V, M428L, N434S, N434A, M252Y, S254T, T256E, or a combination thereof, based on the EU numbering scheme.

[0946] In some aspects, the knob-into-hole modifications are hole substitutions of Y349C, T366S, L368A and Y407V, based on the EU numbering scheme. In some aspects, the knob-into-hole modifications are hole substitutions of M428L and N434S. In some aspects, the knob-into-hole modification is a hole substitution of N434A. In some aspects, the knob-into-hole modifications are hole substitutions of M428L and N434S or N434A, based on the EU numbering scheme. In some aspects, the knob-into-hole modifications are hole substitutions of M252Y, S254T and T256E, based on the EU numbering scheme. In some aspects, the knob-into-hole modifications are hole substitutions of Y349C, T366S, L368A, Y407V, M428L, and N434S.

[0947] In some aspects, an antigen binding polypeptide complex is an IgG1 or IgG4 antibody and the knob-into-hole modifications are knob substitutions of S354C and T366W and hole substitutions of Y349C, T366S, L368A and Y407V.

[0948] In some aspects, the antigen binding polypeptide complex is an IgG1 or IgG4 antibody and the knob-into-hole modifications are hole substitutions of M428L and N434S or N434A. In some aspects, the knob-into-hole modifications are hole substitutions of M428L and N434S. In some aspects, the knob-into-hole modification is a hole substitution of N434A.

[0949] In some aspects, the antigen binding polypeptide complex is an IgG1 or IgG4 antibody and the knob-into-hole modifications are hole substitutions of M252Y, S254T and T256E.

[0950] In some aspects, the modifications or mutations can be both in the Fc region and in the antigen binding polypeptide or antigen binding polypeptide complex.

[0951] Detectable Labels

[0952] In some aspects, an antigen binding polypeptide or polypeptide complex (e.g., an antibody or antigen binding fragment thereof) provided herein comprises one or more detectable labels. An antigen binding polypeptide or polypeptide complex (e.g., an antibody or antigen binding fragment thereof) containing a detectable label is useful in therapeutic, diagnostic, imaging (e.g., radioimaging), or basic research applications.

[0953] In some aspects, the detectable label is a radioactive label. Examples of a radioactive label include, but are not limited to, the isotopes ³H, ¹⁴C, ³²P, ³⁵S, ³⁶Cl, ⁵¹Cr, ⁵⁷Co, ⁵⁸Co, ⁵⁹Fe, ⁹⁰Y, ¹²¹I, ¹²⁴I, ¹²⁵I, ¹³¹I, ¹¹¹In, ¹¹⁷Lu, ²¹¹At, ¹⁹⁸Au, ⁶⁷Cu, ²²⁵Ac, ²¹³Bi, ⁹⁹Tc, ¹⁸⁶Re and ⁸⁹Zr.

[0954] In some aspects, the detectable label is a chemiluminescent label, fluorescent label, enzyme, biotin, or a combination thereof.

[0955] In some aspects, the detectable label is a peptide tag. In some aspects, the peptide tag is located at or near the N-terminus of the polypeptide or polypeptide complex. In some aspects, the peptide tag is located or near at the C-terminus of the polypeptide or polypeptide complex. In some aspects, the peptide tag is an affinity tag or fusion tag.

[0956] In some aspects, the detectable label is a polyhistidine tag, polyarginine tag, glutathione-S-transferase (GST), maltose binding protein (MBP), chitin binding protein (CBP), Strep-tag, thioredoxin (TRX), poly(NANP), FLAG tag, ALFA-tag, V5-tag, Myc-tag, hemagglutinin (HA) tag, Spot tag, T7 tag, NE tag, or green fluorescence protein (GFP), or a combination thereof. In some aspects, the polyhistidine tag consists of from about 4 to about 10 histidine residues. In some aspects, the polyhistidine tag consists of about 4, about 5, about 6, about 7, about 8, about 9, or about 10 histidine residues.

[0957] Additional examples of detectable labels and methods for introducing detectable labels into a polypeptide are known and include routine chemical, molecular biology and recombinant DNA techniques. See, e.g., Hnatowich et al., Science, 220(4597):613-615, 1983; Yao et al., Int. J. Mol. Sci., 17(2):194, 2016; Kimple et al., Curr. Protoc. Protein Sci., 73:Unit 9.9, 2013; Sambrook J, Fritsch E F. Molecular Cloning: A Laboratory Manual. Cold Spring Harbor Laboratory Press; Cold Spring Harbor, N.Y.: 1989; Molecular Cell Biology, 4^{th} edition, Section 3.5, Purifying, Detecting and Characterizing Proteins; and Mahmoodi et al., Cogent Biology, 5(1):DOI: 10/1080/23312025.2019.1665406.

### Polypeptides, Polynucleotides, Vectors, Cells, and Protein Production Methods

[0958] In some aspects, a polypeptide encoding an antigen binding polypeptide or antigen polypeptide complex (e.g., an antibody or antigen binding fragment thereof) is provided herein.

[0959] In some aspects, a polypeptide provided herein comprises an amino acid sequence having at least 80%, at least 85%, at least 90%, at least 91%, at least 92%, at least 93%, at least 94%, at least 95%, at least 96%, at least 97%, at least 98%, at least 99% or 100% identity to one or more of SEQ ID NOs:46-113, 150-165, 190-258, 291, 295, 297, 299, 301, 303, 305, 307, 309, 311, 313, 315, 317, 319, 321, 323, 325, 327, 329, 331, 333, 335, 337, 339, 341, 343, 345, 347, 349, 351, 353, 355, 357, 359, 361, 363, 365, 367, 369, 371, 373, 375, 377, 379, 381, 383, 385, 387, 389, 391, 395, 397, 399, 401, 403, 405, 407, 409, 411, 413, 415, 417, 419, 421, 423, 425, 427, 429, 431, 433, 435, 437, 439, 441, 443, 445, 447, 449, 451, 453, 455, 457, 459, 461, 463, 465, 467, 469, 471, 473, 475, 477, 479, 481, 483, 485, 487, 489, 491, 493, 495, 497, 499, 501, 503, 505 and 711-754. In some aspects, a polypeptide provided herein comprises or consists of an amino acid sequence having at least 80% (such as at least 85%, at least 90%, at least 91%, at least 92%, at least 93%, at least 94%, at least 95%, at least 96%, at least 97%, at least 98%, at least 99% or 100%) identity to SEQ ID NO: 46. In some aspects, a polypeptide provided herein comprises or consists of an amino acid sequence having at least 80% (such as at least 85%, at least 90%, at least 91%, at least 92%, at least 93%, at least 94%, at least 95%, at least 96%, at least 97%, at least 98%, at least 99% or 100%) identity to SEQ ID NO: 47. In some aspects, a polypeptide provided herein comprises or consists of an amino acid sequence having at least 80% (such as at least 85%, at least 90%, at least 91%, at least 92%, at least 93%, at least 94%, at least 95%, at least 96%, at least 97%, at least 98%, at least 99% or 100%) identity to SEQ ID NO: 48. In some aspects, a polypeptide provided herein comprises or consists of an amino acid sequence having at least 80% (such as at least 85%, at least 90%, at least 91%, at least 92%, at least 93%, at least 94%, at least 95%, at least 96%, at least 97%, at least 98%, at least 99% or 100%) identity to SEQ ID NO: 49. In some aspects, a polypeptide provided herein comprises or consists of an amino acid sequence having at least 80% (such as at least 85%, at least 90%, at least 91%, at least 92%, at least 93%, at least 94%, at least 95%, at least 96%, at least 97%, at least 98%, at least 99% or 100%) identity to SEQ ID NO: 50. In some aspects, a polypeptide provided herein comprises or consists of an amino acid sequence having at least 80% (such as at least 85%, at least 90%, at least 91%, at least 92%, at least 93%, at least 94%, at least 95%, at least 96%, at least 97%, at least 98%, at least 99% or 100%) identity to SEQ ID NO: 51. In some aspects, a polypeptide provided herein comprises or consists of an amino acid sequence having at least 80% (such as at least 85%, at least 90%, at least 91%, at least 92%, at least 93%, at least 94%, at least 95%, at least 96%, at least 97%, at least 98%, at least 99% or 100%) identity to SEQ ID NO: 52. In some aspects, a polypeptide provided herein comprises or consists of an amino acid sequence having at least 80% (such as at least 85%, at least 90%, at least 91%, at least 92%, at least 93%, at least 94%, at least 95%, at least 96%, at least 97%, at least 98%, at least 99% or 100%) identity to SEQ ID NO: 53. In some aspects, a polypeptide provided herein comprises or consists of an amino acid sequence having at least 80% (such as at least 85%, at least 90%, at least 91%, at least 92%, at least 93%, at least 94%, at least 95%, at least 96%, at least 97%, at least 98%, at least 99% or 100%) identity to SEQ ID NO: 54. In some aspects, a polypeptide provided herein comprises or consists of an amino acid sequence having at least 80% (such as at least 85%, at least 90%, at least 91%, at least 92%, at least 93%, at least 94%, at least 95%, at least 96%, at least 97%, at least 98%, at least 99% or 100%) identity to SEQ ID NO: 55. In some aspects, a polypeptide provided herein comprises or consists of an amino acid sequence having at least 80% (such as at least 85%, at least 90%, at least 91%, at least 92%, at least 93%, at least 94%, at least 95%, at least 96%, at least 97%, at least 98%, at least 99% or 100%) identity to SEQ ID NO: 56. In some aspects, a polypeptide provided herein comprises or consists of an amino acid sequence having at least 80% (such as at least 85%, at least 90%, at least 91%, at least 92%, at least 93%, at least 94%, at least 95%, at least 96%, at least 97%, at least 98%, at least 99% or 100%) identity to SEQ ID NO: 57. In some aspects, a polypeptide provided herein comprises or consists of an amino acid sequence having at least 80% (such as at least 85%, at least 90%, at least 91%, at least 92%, at least 93%, at least 94%, at least 95%, at least 96%, at least 97%, at least 98%, at least 99% or 100%) identity to SEQ ID NO: 58. In some aspects, a polypeptide provided herein comprises or consists of an amino acid sequence having at least 80% (such as at least 85%, at least 90%, at least 91%, at least 92%, at least 93%, at least 94%, at least 95%, at least 96%, at least 97%, at least 98%, at least 99% or 100%) identity to SEQ ID NO: 59. In some aspects, a polypeptide provided herein comprises or consists of an amino acid sequence having at least 80% (such as at least 85%, at least 90%, at least 91%, at least 92%, at least 93%, at least 94%, at least 95%, at least 96%, at least 97%, at least 98%, at least 99% or 100%) identity to SEQ ID NO: 60. In some aspects, a polypeptide provided herein comprises or consists of an amino acid sequence having at least 80% (such as at least 85%, at least 90%, at least 91%, at least 92%, at least 93%, at least 94%, at least 95%, at least 96%, at least 97%, at least 98%, at least 99% or 100%) identity to SEQ ID NO: 61. In some aspects, a polypeptide provided herein comprises or consists of an amino acid sequence having at least 80% (such as at least 85%, at least 90%, at least 91%, at least 92%, at least 93%, at least 94%, at least 95%, at least 96%, at least 97%, at least 98%, at least 99% or 100%) identity to SEQ ID NO: 62. In some aspects, a polypeptide provided herein comprises or consists of an amino acid sequence having at least 80% (such as at least 85%, at least 90%, at least 91%, at least 92%, at least 93%, at least 94%, at least 95%, at least 96%, at least 97%, at least 98%, at least 99% or 100%) identity to SEQ ID NO: 63. In some aspects, a polypeptide provided herein comprises or consists of an amino acid sequence having at least 80% (such as at least 85%, at least 90%, at least 91%, at least 92%, at least 93%, at least 94%, at least 95%, at least 96%, at least 97%, at least 98%, at least 99% or 100%) identity to SEQ ID NO: 64. In some aspects, a polypeptide provided herein comprises or consists of an amino acid sequence having at least 80% (such as at least 85%, at least 90%, at least 91%, at least 92%, at least 93%, at least 94%, at least 95%, at least 96%, at least 97%, at least 98%, at least 99% or 100%) identity to SEQ ID NO: 65. In some aspects, a polypeptide provided herein comprises or consists of an amino acid sequence having at least 80% (such as at least 85%, at least 90%, at least 91%, at least 92%, at least 93%, at least 94%, at least 95%, at least 96%, at least 97%, at least 98%, at least 99% or 100%) identity to SEQ ID NO: 66. In some aspects, a polypeptide provided herein comprises or consists of an amino acid sequence having at least 80% (such as at least 85%, at least 90%, at least 91%, at least 92%, at least 93%, at least 94%, at least 95%, at least 96%, at least 97%, at least 98%, at least 99% or 100%) identity to SEQ ID NO: 67. In some aspects, a polypeptide provided herein comprises or consists of an amino acid sequence having at least 80% (such as at least 85%, at least 90%, at least 91%, at least 92%, at least 93%, at least 94%, at least 95%, at least 96%, at least 97%, at least 98%, at least 99% or 100%) identity to SEQ ID NO: 68. In some aspects, a polypeptide provided herein comprises or consists of an amino acid sequence having at least 80% (such as at least 85%, at least 90%, at least 91%, at least 92%, at least 93%, at least 94%, at least 95%, at least 96%, at least 97%, at least 98%, at least 99% or 100%) identity to SEQ ID NO: 69. In some aspects, a polypeptide provided herein comprises or consists of an amino acid sequence having at least 80% (such as at least 85%, at least 90%, at least 91%, at least 92%, at least 93%, at least 94%, at least 95%, at least 96%, at least 97%, at least 98%, at least 99% or 100%) identity to SEQ ID NO: 70. In some aspects, a polypeptide provided herein comprises or consists of an amino acid sequence having at least 80% (such as at least 85%, at least 90%, at least 91%, at least 92%, at least 93%, at least 94%, at least 95%, at least 96%, at least 97%, at least 98%, at least 99% or 100%) identity to SEQ ID NO: 71. In some aspects, a polypeptide provided herein comprises or consists of an amino acid sequence having at least 80% (such as at least 85%, at least 90%, at least 91%, at least 92%, at least 93%, at least 94%, at least 95%, at least 96%, at least 97%, at least 98%, at least 99% or 100%) identity to SEQ ID NO: 72. In some aspects, a polypeptide provided herein comprises or consists of an amino acid sequence having at least 80% (such as at least 85%, at least 90%, at least 91%, at least 92%, at least 93%, at least 94%, at least 95%, at least 96%, at least 97%, at least 98%, at least 99% or 100%) identity to SEQ ID NO: 73. In some aspects, a polypeptide provided herein comprises or consists of an amino acid sequence having at least 80% (such as at least 85%, at least 90%, at least 91%, at least 92%, at least 93%, at least 94%, at least 95%, at least 96%, at least 97%, at least 98%, at least 99% or 100%) identity to SEQ ID NO: 74. In some aspects, a polypeptide provided herein comprises or consists of an amino acid sequence having at least 80% (such as at least 85%, at least 90%, at least 91%, at least 92%, at least 93%, at least 94%, at least 95%, at least 96%, at least 97%, at least 98%, at least 99% or 100%) identity to SEQ ID NO: 75. In some aspects, a polypeptide provided herein comprises or consists of an amino acid sequence having at least 80% (such as at least 85%, at least 90%, at least 91%, at least 92%, at least 93%, at least 94%, at least 95%, at least 96%, at least 97%, at least 98%, at least 99% or 100%) identity to SEQ ID NO: 76. In some aspects, a polypeptide provided herein comprises or consists of an amino acid sequence having at least 80% (such as at least 85%, at least 90%, at least 91%, at least 92%, at least 93%, at least 94%, at least 95%, at least 96%, at least 97%, at least 98%, at least 99% or 100%) identity to SEQ ID NO: 77. In some aspects, a polypeptide provided herein comprises or consists of an amino acid sequence having at least 80% (such as at least 85%, at least 90%, at least 91%, at least 92%, at least 93%, at least 94%, at least 95%, at least 96%, at least 97%, at least 98%, at least 99% or 100%) identity to SEQ ID NO: 78. In some aspects, a polypeptide provided herein comprises or consists of an amino acid sequence having at least 80% (such as at least 85%, at least 90%, at least 91%, at least 92%, at least 93%, at least 94%, at least 95%, at least 96%, at least 97%, at least 98%, at least 99% or 100%) identity to SEQ ID NO: 79. In some aspects, a polypeptide provided herein comprises or consists of an amino acid sequence having at least 80% (such as at least 85%, at least 90%, at least 91%, at least 92%, at least 93%, at least 94%, at least 95%, at least 96%, at least 97%, at least 98%, at least 99% or 100%) identity to SEQ ID NO: 80. In some aspects, a polypeptide provided herein comprises or consists of an amino acid sequence having at least 80% (such as at least 85%, at least 90%, at least 91%, at least 92%, at least 93%, at least 94%, at least 95%, at least 96%, at least 97%, at least 98%, at least 99% or 100%) identity to SEQ ID NO: 81. In some aspects, a polypeptide provided herein comprises or consists of an amino acid sequence having at least 80% (such as at least 85%, at least 90%, at least 91%, at least 92%, at least 93%, at least 94%, at least 95%, at least 96%, at least 97%, at least 98%, at least 99% or 100%) identity to SEQ ID NO: 82. In some aspects, a polypeptide provided herein comprises or consists of an amino acid sequence having at least 80% (such as at least 85%, at least 90%, at least 91%, at least 92%, at least 93%, at least 94%, at least 95%, at least 96%, at least 97%, at least 98%, at least 99% or 100%) identity to SEQ ID NO: 83. In some aspects, a polypeptide provided herein comprises or consists of an amino acid sequence having at least 80% (such as at least 85%, at least 90%, at least 91%, at least 92%, at least 93%, at least 94%, at least 95%, at least 96%, at least 97%, at least 98%, at least 99% or 100%) identity to SEQ ID NO: 84. In some aspects, a polypeptide provided herein comprises or consists of an amino acid sequence having at least 80% (such as at least 85%, at least 90%, at least 91%, at least 92%, at least 93%, at least 94%, at least 95%, at least 96%, at least 97%, at least 98%, at least 99% or 100%) identity to SEQ ID NO: 85. In some aspects, a polypeptide provided herein comprises or consists of an amino acid sequence having at least 80% (such as at least 85%, at least 90%, at least 91%, at least 92%, at least 93%, at least 94%, at least 95%, at least 96%, at least 97%, at least 98%, at least 99% or 100%) identity to SEQ ID NO: 86. In some aspects, a polypeptide provided herein comprises or consists of an amino acid sequence having at least 80% (such as at least 85%, at least 90%, at least 91%, at least 92%, at least 93%, at least 94%, at least 95%, at least 96%, at least 97%, at least 98%, at least 99% or 100%) identity to SEQ ID NO: 87. In some aspects, a polypeptide provided herein comprises or consists of an amino acid sequence having at least 80% (such as at least 85%, at least 90%, at least 91%, at least 92%, at least 93%, at least 94%, at least 95%, at least 96%, at least 97%, at least 98%, at least 99% or 100%) identity to SEQ ID NO: 88. In some aspects, a polypeptide provided herein comprises or consists of an amino acid sequence having at least 80% (such as at least 85%, at least 90%, at least 91%, at least 92%, at least 93%, at least 94%, at least 95%, at least 96%, at least 97%, at least 98%, at least 99% or 100%) identity to SEQ ID NO: 89. In some aspects, a polypeptide provided herein comprises or consists of an amino acid sequence having at least 80% (such as at least 85%, at least 90%, at least 91%, at least 92%, at least 93%, at least 94%, at least 95%, at least 96%, at least 97%, at least 98%, at least 99% or 100%) identity to SEQ ID NO: 90. In some aspects, a polypeptide provided herein comprises or consists of an amino acid sequence having at least 80% (such as at least 85%, at least 90%, at least 91%, at least 92%, at least 93%, at least 94%, at least 95%, at least 96%, at least 97%, at least 98%, at least 99% or 100%) identity to SEQ ID NO: 91. In some aspects, a polypeptide provided herein comprises or consists of an amino acid sequence having at least 80% (such as at least 85%, at least 90%, at least 91%, at least 92%, at least 93%, at least 94%, at least 95%, at least 96%, at least 97%, at least 98%, at least 99% or 100%) identity to SEQ ID NO: 92. In some aspects, a polypeptide provided herein comprises or consists of an amino acid sequence having at least 80% (such as at least 85%, at least 90%, at least 91%, at least 92%, at least 93%, at least 94%, at least 95%, at least 96%, at least 97%, at least 98%, at least 99% or 100%) identity to SEQ ID NO: 93. In some aspects, a polypeptide provided herein comprises or consists of an amino acid sequence having at least 80% (such as at least 85%, at least 90%, at least 91%, at least 92%, at least 93%, at least 94%, at least 95%, at least 96%, at least 97%, at least 98%, at least 99% or 100%) identity to SEQ ID NO: 94. In some aspects, a polypeptide provided herein comprises or consists of an amino acid sequence having at least 80% (such as at least 85%, at least 90%, at least 91%, at least 92%, at least 93%, at least 94%, at least 95%, at least 96%, at least 97%, at least 98%, at least 99% or 100%) identity to SEQ ID NO: 95. In some aspects, a polypeptide provided herein comprises or consists of an amino acid sequence having at least 80% (such as at least 85%, at least 90%, at least 91%, at least 92%, at least 93%, at least 94%, at least 95%, at least 96%, at least 97%, at least 98%, at least 99% or 100%) identity to SEQ ID NO: 96. In some aspects, a polypeptide provided herein comprises or consists of an amino acid sequence having at least 80% (such as at least 85%, at least 90%, at least 91%, at least 92%, at least 93%, at least 94%, at least 95%, at least 96%, at least 97%, at least 98%, at least 99% or 100%) identity to SEQ ID NO: 97. In some aspects, a polypeptide provided herein comprises or consists of an amino acid sequence having at least 80% (such as at least 85%, at least 90%, at least 91%, at least 92%, at least 93%, at least 94%, at least 95%, at least 96%, at least 97%, at least 98%, at least 99% or 100%) identity to SEQ ID NO: 98. In some aspects, a polypeptide provided herein comprises or consists of an amino acid sequence having at least 80% (such as at least 85%, at least 90%, at least 91%, at least 92%, at least 93%, at least 94%, at least 95%, at least 96%, at least 97%, at least 98%, at least 99% or 100%) identity to SEQ ID NO: 99. In some aspects, a polypeptide provided herein comprises or consists of an amino acid sequence having at least 80% (such as at least 85%, at least 90%, at least 91%, at least 92%, at least 93%, at least 94%, at least 95%, at least 96%, at least 97%, at least 98%, at least 99% or 100%) identity to SEQ ID NO: 100. In some aspects, a polypeptide provided herein comprises or consists of an amino acid sequence having at least 80% (such as at least 85%, at least 90%, at least 91%, at least 92%, at least 93%, at least 94%, at least 95%, at least 96%, at least 97%, at least 98%, at least 99% or 100%) identity to SEQ ID NO: 101. In some aspects, a polypeptide provided herein comprises or consists of an amino acid sequence having at least 80% (such as at least 85%, at least 90%, at least 91%, at least 92%, at least 93%, at least 94%, at least 95%, at least 96%, at least 97%, at least 98%, at least 99% or 100%) identity to SEQ ID NO: 102. In some aspects, a polypeptide provided herein comprises or consists of an amino acid sequence having at least 80% (such as at least 85%, at least 90%, at least 91%, at least 92%, at least 93%, at least 94%, at least 95%, at least 96%, at least 97%, at least 98%, at least 99% or 100%) identity to SEQ ID NO: 103. In some aspects, a polypeptide provided herein comprises or consists of an amino acid sequence having at least 80% (such as at least 85%, at least 90%, at least 91%, at least 92%, at least 93%, at least 94%, at least 95%, at least 96%, at least 97%, at least 98%, at least 99% or 100%) identity to SEQ ID NO: 104. In some aspects, a polypeptide provided herein comprises or consists of an amino acid sequence having at least 80% (such as at least 85%, at least 90%, at least 91%, at least 92%, at least 93%, at least 94%, at least 95%, at least 96%, at least 97%, at least 98%, at least 99% or 100%) identity to SEQ ID NO: 105. In some aspects, a polypeptide provided herein comprises or consists of an amino acid sequence having at least 80% (such as at least 85%, at least 90%, at least 91%, at least 92%, at least 93%, at least 94%, at least 95%, at least 96%, at least 97%, at least 98%, at least 99% or 100%) identity to SEQ ID NO: 106. In some aspects, a polypeptide provided herein comprises or consists of an amino acid sequence having at least 80% (such as at least 85%, at least 90%, at least 91%, at least 92%, at least 93%, at least 94%, at least 95%, at least 96%, at least 97%, at least 98%, at least 99% or 100%) identity to SEQ ID NO: 107. In some aspects, a polypeptide provided herein comprises or consists of an amino acid sequence having at least 80% (such as at least 85%, at least 90%, at least 91%, at least 92%, at least 93%, at least 94%, at least 95%, at least 96%, at least 97%, at least 98%, at least 99% or 100%) identity to SEQ ID NO: 108. In some aspects, a polypeptide provided herein comprises or consists of an amino acid sequence having at least 80% (such as at least 85%, at least 90%, at least 91%, at least 92%, at least 93%, at least 94%, at least 95%, at least 96%, at least 97%, at least 98%, at least 99% or 100%) identity to SEQ ID NO: 109. In some aspects, a polypeptide provided herein comprises or consists of an amino acid sequence having at least 80% (such as at least 85%, at least 90%, at least 91%, at least 92%, at least 93%, at least 94%, at least 95%, at least 96%, at least 97%, at least 98%, at least 99% or 100%) identity to SEQ ID NO: 110. In some aspects, a polypeptide provided herein comprises or consists of an amino acid sequence having at least 80% (such as at least 85%, at least 90%, at least 91%, at least 92%, at least 93%, at least 94%, at least 95%, at least 96%, at least 97%, at least 98%, at least 99% or 100%) identity to SEQ ID NO: 111. In some aspects, a polypeptide provided herein comprises or consists of an amino acid sequence having at least 80% (such as at least 85%, at least 90%, at least 91%, at least 92%, at least 93%, at least 94%, at least 95%, at least 96%, at least 97%, at least 98%, at least 99% or 100%) identity to SEQ ID NO: 112. In some aspects, a polypeptide provided herein comprises or consists of an amino acid sequence having at least 80% (such as at least 85%, at least 90%, at least 91%, at least 92%, at least 93%, at least 94%, at least 95%, at least 96%, at least 97%, at least 98%, at least 99% or 100%) identity to SEQ ID NO: 113. In some aspects, a polypeptide provided herein comprises or consists of an amino acid sequence having at least 80% (such as at least 85%, at least 90%, at least 91%, at least 92%, at least 93%, at least 94%, at least 95%, at least 96%, at least 97%, at least 98%, at least 99% or 100%) identity to SEQ ID NO: 150. In some aspects, a polypeptide provided herein comprises or consists of an amino acid sequence having at least 80% (such as at least 85%, at least 90%, at least 91%, at least 92%, at least 93%, at least 94%, at least 95%, at least 96%, at least 97%, at least 98%, at least 99% or 100%) identity to SEQ ID NO: 151. In some aspects, a polypeptide provided herein comprises or consists of an amino acid sequence having at least 80% (such as at least 85%, at least 90%, at least 91%, at least 92%, at least 93%, at least 94%, at least 95%, at least 96%, at least 97%, at least 98%, at least 99% or 100%) identity to SEQ ID NO: 152. In some aspects, a polypeptide provided herein comprises or consists of an amino acid sequence having at least 80% (such as at least 85%, at least 90%, at least 91%, at least 92%, at least 93%, at least 94%, at least 95%, at least 96%, at least 97%, at least 98%, at least 99% or 100%) identity to SEQ ID NO: 153. In some aspects, a polypeptide provided herein comprises or consists of an amino acid sequence having at least 80% (such as at least 85%, at least 90%, at least 91%, at least 92%, at least 93%, at least 94%, at least 95%, at least 96%, at least 97%, at least 98%, at least 99% or 100%) identity to SEQ ID NO: 154. In some aspects, a polypeptide provided herein comprises or consists of an amino acid sequence having at least 80% (such as at least 85%, at least 90%, at least 91%, at least 92%, at least 93%, at least 94%, at least 95%, at least 96%, at least 97%, at least 98%, at least 99% or 100%) identity to SEQ ID NO: 155. In some aspects, a polypeptide provided herein comprises or consists of an amino acid sequence having at least 80% (such as at least 85%, at least 90%, at least 91%, at least 92%, at least 93%, at least 94%, at least 95%, at least 96%, at least 97%, at least 98%, at least 99% or 100%) identity to SEQ ID NO: 156. In some aspects, a polypeptide provided herein comprises or consists of an amino acid sequence having at least 80% (such as at least 85%, at least 90%, at least 91%, at least 92%, at least 93%, at least 94%, at least 95%, at least 96%, at least 97%, at least 98%, at least 99% or 100%) identity to SEQ ID NO: 157. In some aspects, a polypeptide provided herein comprises or consists of an amino acid sequence having at least 80% (such as at least 85%, at least 90%, at least 91%, at least 92%, at least 93%, at least 94%, at least 95%, at least 96%, at least 97%, at least 98%, at least 99% or 100%) identity to SEQ ID NO: 158. In some aspects, a polypeptide provided herein comprises or consists of an amino acid sequence having at least 80% (such as at least 85%, at least 90%, at least 91%, at least 92%, at least 93%, at least 94%, at least 95%, at least 96%, at least 97%, at least 98%, at least 99% or 100%) identity to SEQ ID NO: 159. In some aspects, a polypeptide provided herein comprises or consists of an amino acid sequence having at least 80% (such as at least 85%, at least 90%, at least 91%, at least 92%, at least 93%, at least 94%, at least 95%, at least 96%, at least 97%, at least 98%, at least 99% or 100%) identity to SEQ ID NO: 160. In some aspects, a polypeptide provided herein comprises or consists of an amino acid sequence having at least 80% (such as at least 85%, at least 90%, at least 91%, at least 92%, at least 93%, at least 94%, at least 95%, at least 96%, at least 97%, at least 98%, at least 99% or 100%) identity to SEQ ID NO: 161. In some aspects, a polypeptide provided herein comprises or consists of an amino acid sequence having at least 80% (such as at least 85%, at least 90%, at least 91%, at least 92%, at least 93%, at least 94%, at least 95%, at least 96%, at least 97%, at least 98%, at least 99% or 100%) identity to SEQ ID NO: 162. In some aspects, a polypeptide provided herein comprises or consists of an amino acid sequence having at least 80% (such as at least 85%, at least 90%, at least 91%, at least 92%, at least 93%, at least 94%, at least 95%, at least 96%, at least 97%, at least 98%, at least 99% or 100%) identity to SEQ ID NO: 163. In some aspects, a polypeptide provided herein comprises or consists of an amino acid sequence having at least 80% (such as at least 85%, at least 90%, at least 91%, at least 92%, at least 93%, at least 94%, at least 95%, at least 96%, at least 97%, at least 98%, at least 99% or 100%) identity to SEQ ID NO: 164. In some aspects, a polypeptide provided herein comprises or consists of an amino acid sequence having at least 80% (such as at least 85%, at least 90%, at least 91%, at least 92%, at least 93%, at least 94%, at least 95%, at least 96%, at least 97%, at least 98%, at least 99% or 100%) identity to SEQ ID NO: 165. In some aspects, a polypeptide provided herein comprises or consists of an amino acid sequence having at least 80% (such as at least 85%, at least 90%, at least 91%, at least 92%, at least 93%, at least 94%, at least 95%, at least 96%, at least 97%, at least 98%, at least 99% or 100%) identity to SEQ ID NO: 190. In some aspects, a polypeptide provided herein comprises or consists of an amino acid sequence having at least 80% (such as at least 85%, at least 90%, at least 91%, at least 92%, at least 93%, at least 94%, at least 95%, at least 96%, at least 97%, at least 98%, at least 99% or 100%) identity to SEQ ID NO: In some aspects, a polypeptide provided herein comprises or consists of an amino acid sequence having at least 80% (such as at least 85%, at least 90%, at least 91%, at least 92%, at least 93%, at least 94%, at least 95%, at least 96%, at least 97%, at least 98%, at least 99% or 100%) identity to SEQ ID NO: 192. In some aspects, a polypeptide provided herein comprises or consists of an amino acid sequence having at least 80% (such as at least 85%, at least 90%, at least 91%, at least 92%, at least 93%, at least 94%, at least 95%, at least 96%, at least 97%, at least 98%, at least 99% or 100%) identity to SEQ ID NO: 193. In some aspects, a polypeptide provided herein comprises or consists of an amino acid sequence having at least 80% (such as at least 85%, at least 90%, at least 91%, at least 92%, at least 93%, at least 94%, at least 95%, at least 96%, at least 97%, at least 98%, at least 99% or 100%) identity to SEQ ID NO: 194. In some aspects, a polypeptide provided herein comprises or consists of an amino acid sequence having at least 80% (such as at least 85%, at least 90%, at least 91%, at least 92%, at least 93%, at least 94%, at least 95%, at least 96%, at least 97%, at least 98%, at least 99% or 100%) identity to SEQ ID NO: 195. In some aspects, a polypeptide provided herein comprises or consists of an amino acid sequence having at least 80% (such as at least 85%, at least 90%, at least 91%, at least 92%, at least 93%, at least 94%, at least 95%, at least 96%, at least 97%, at least 98%, at least 99% or 100%) identity to SEQ ID NO: 196. In some aspects, a polypeptide provided herein comprises or consists of an amino acid sequence having at least 80% (such as at least 85%, at least 90%, at least 91%, at least 92%, at least 93%, at least 94%, at least 95%, at least 96%, at least 97%, at least 98%, at least 99% or 100%) identity to SEQ ID NO: 197. In some aspects, a polypeptide provided herein comprises or consists of an amino acid sequence having at least 80% (such as at least 85%, at least 90%, at least 91%, at least 92%, at least 93%, at least 94%, at least 95%, at least 96%, at least 97%, at least 98%, at least 99% or 100%) identity to SEQ ID NO: 198. In some aspects, a polypeptide provided herein comprises or consists of an amino acid sequence having at least 80% (such as at least 85%, at least 90%, at least 91%, at least 92%, at least 93%, at least 94%, at least 95%, at least 96%, at least 97%, at least 98%, at least 99% or 100%) identity to SEQ ID NO: 199. In some aspects, a polypeptide provided herein comprises or consists of an amino acid sequence having at least 80% (such as at least 85%, at least 90%, at least 91%, at least 92%, at least 93%, at least 94%, at least 95%, at least 96%, at least 97%, at least 98%, at least 99% or 100%) identity to SEQ ID NO: 200. In some aspects, a polypeptide provided herein comprises or consists of an amino acid sequence having at least 80% (such as at least 85%, at least 90%, at least 91%, at least 92%, at least 93%, at least 94%, at least 95%, at least 96%, at least 97%, at least 98%, at least 99% or 100%) identity to SEQ ID NO: 201. In some aspects, a polypeptide provided herein comprises or consists of an amino acid sequence having at least 80% (such as at least 85%, at least 90%, at least 91%, at least 92%, at least 93%, at least 94%, at least 95%, at least 96%, at least 97%, at least 98%, at least 99% or 100%) identity to SEQ ID NO: 202. In some aspects, a polypeptide provided herein comprises or consists of an amino acid sequence having at least 80% (such as at least 85%, at least 90%, at least 91%, at least 92%, at least 93%, at least 94%, at least 95%, at least 96%, at least 97%, at least 98%, at least 99% or 100%) identity to SEQ ID NO: 203. In some aspects, a polypeptide provided herein comprises or consists of an amino acid sequence having at least 80% (such as at least 85%, at least 90%, at least 91%, at least 92%, at least 93%, at least 94%, at least 95%, at least 96%, at least 97%, at least 98%, at least 99% or 100%) identity to SEQ ID NO: 204. In some aspects, a polypeptide provided herein comprises or consists of an amino acid sequence having at least 80% (such as at least 85%, at least 90%, at least 91%, at least 92%, at least 93%, at least 94%, at least 95%, at least 96%, at least 97%, at least 98%, at least 99% or 100%) identity to SEQ ID NO: 205. In some aspects, a polypeptide provided herein comprises or consists of an amino acid sequence having at least 80% (such as at least 85%, at least 90%, at least 91%, at least 92%, at least 93%, at least 94%, at least 95%, at least 96%, at least 97%, at least 98%, at least 99% or 100%) identity to SEQ ID NO: 206. In some aspects, a polypeptide provided herein comprises or consists of an amino acid sequence having at least 80% (such as at least 85%, at least 90%, at least 91%, at least 92%, at least 93%, at least 94%, at least 95%, at least 96%, at least 97%, at least 98%, at least 99% or 100%) identity to SEQ ID NO: 207. In some aspects, a polypeptide provided herein comprises or consists of an amino acid sequence having at least 80% (such as at least 85%, at least 90%, at least 91%, at least 92%, at least 93%, at least 94%, at least 95%, at least 96%, at least 97%, at least 98%, at least 99% or 100%) identity to SEQ ID NO: 208. In some aspects, a polypeptide provided herein comprises or consists of an amino acid sequence having at least 80% (such as at least 85%, at least 90%, at least 91%, at least 92%, at least 93%, at least 94%, at least 95%, at least 96%, at least 97%, at least 98%, at least 99% or 100%) identity to SEQ ID NO: 209. In some aspects, a polypeptide provided herein comprises or consists of an amino acid sequence having at least 80% (such as at least 85%, at least 90%, at least 91%, at least 92%, at least 93%, at least 94%, at least 95%, at least 96%, at least 97%, at least 98%, at least 99% or 100%) identity to SEQ ID NO: 210. In some aspects, a polypeptide provided herein comprises or consists of an amino acid sequence having at least 80% (such as at least 85%, at least 90%, at least 91%, at least 92%, at least 93%, at least 94%, at least 95%, at least 96%, at least 97%, at least 98%, at least 99% or 100%) identity to SEQ ID NO: 211. In some aspects, a polypeptide provided herein comprises or consists of an amino acid sequence having at least 80% (such as at least 85%, at least 90%, at least 91%, at least 92%, at least 93%, at least 94%, at least 95%, at least 96%, at least 97%, at least 98%, at least 99% or 100%) identity to SEQ ID NO: 212. In some aspects, a polypeptide provided herein comprises or consists of an amino acid sequence having at least 80% (such as at least 85%, at least 90%, at least 91%, at least 92%, at least 93%, at least 94%, at least 95%, at least 96%, at least 97%, at least 98%, at least 99% or 100%) identity to SEQ ID NO: 213. In some aspects, a polypeptide provided herein comprises or consists of an amino acid sequence having at least 80% (such as at least 85%, at least 90%, at least 91%, at least 92%, at least 93%, at least 94%, at least 95%, at least 96%, at least 97%, at least 98%, at least 99% or 100%) identity to SEQ ID NO: 214. In some aspects, a polypeptide provided herein comprises or consists of an amino acid sequence having at least 80% (such as at least 85%, at least 90%, at least 91%, at least 92%, at least 93%, at least 94%, at least 95%, at least 96%, at least 97%, at least 98%, at least 99% or 100%) identity to SEQ ID NO: 215. In some aspects, a polypeptide provided herein comprises or consists of an amino acid sequence having at least 80% (such as at least 85%, at least 90%, at least 91%, at least 92%, at least 93%, at least 94%, at least 95%, at least 96%, at least 97%, at least 98%, at least 99% or 100%) identity to SEQ ID NO: 216. In some aspects, a polypeptide provided herein comprises or consists of an amino acid sequence having at least 80% (such as at least 85%, at least 90%, at least 91%, at least 92%, at least 93%, at least 94%, at least 95%, at least 96%, at least 97%, at least 98%, at least 99% or 100%) identity to SEQ ID NO: 217. In some aspects, a polypeptide provided herein comprises or consists of an amino acid sequence having at least 80% (such as at least 85%, at least 90%, at least 91%, at least 92%, at least 93%, at least 94%, at least 95%, at least 96%, at least 97%, at least 98%, at least 99% or 100%) identity to SEQ ID NO: 218. In some aspects, a polypeptide provided herein comprises or consists of an amino acid sequence having at least 80% (such as at least 85%, at least 90%, at least 91%, at least 92%, at least 93%, at least 94%, at least 95%, at least 96%, at least 97%, at least 98%, at least 99% or 100%) identity to SEQ ID NO: 219. In some aspects, a polypeptide provided herein comprises or consists of an amino acid sequence having at least 80% (such as at least 85%, at least 90%, at least 91%, at least 92%, at least 93%, at least 94%, at least 95%, at least 96%, at least 97%, at least 98%, at least 99% or 100%) identity to SEQ ID NO: 220. In some aspects, a polypeptide provided herein comprises or consists of an amino acid sequence having at least 80% (such as at least 85%, at least 90%, at least 91%, at least 92%, at least 93%, at least 94%, at least 95%, at least 96%, at least 97%, at least 98%, at least 99% or 100%) identity to SEQ ID NO: 221. In some aspects, a polypeptide provided herein comprises or consists of an amino acid sequence having at least 80% (such as at least 85%, at least 90%, at least 91%, at least 92%, at least 93%, at least 94%, at least 95%, at least 96%, at least 97%, at least 98%, at least 99% or 100%) identity to SEQ ID NO: 222. In some aspects, a polypeptide provided herein comprises or consists of an amino acid sequence having at least 80% (such as at least 85%, at least 90%, at least 91%, at least 92%, at least 93%, at least 94%, at least 95%, at least 96%, at least 97%, at least 98%, at least 99% or 100%) identity to SEQ ID NO: 223. In some aspects, a polypeptide provided herein comprises or consists of an amino acid sequence having at least 80% (such as at least 85%, at least 90%, at least 91%, at least 92%, at least 93%, at least 94%, at least 95%, at least 96%, at least 97%, at least 98%, at least 99% or 100%) identity to SEQ ID NO: 224. In some aspects, a polypeptide provided herein comprises or consists of an amino acid sequence having at least 80% (such as at least 85%, at least 90%, at least 91%, at least 92%, at least 93%, at least 94%, at least 95%, at least 96%, at least 97%, at least 98%, at least 99% or 100%) identity to SEQ ID NO: 225. In some aspects, a polypeptide provided herein comprises or consists of an amino acid sequence having at least 80% (such as at least 85%, at least 90%, at least 91%, at least 92%, at least 93%, at least 94%, at least 95%, at least 96%, at least 97%, at least 98%, at least 99% or 100%) identity to SEQ ID NO: 226. In some aspects, a polypeptide provided herein comprises or consists of an amino acid sequence having at least 80% (such as at least 85%, at least 90%, at least 91%, at least 92%, at least 93%, at least 94%, at least 95%, at least 96%, at least 97%, at least 98%, at least 99% or 100%) identity to SEQ ID NO: 227. In some aspects, a polypeptide provided herein comprises or consists of an amino acid sequence having at least 80% (such as at least 85%, at least 90%, at least 91%, at least 92%, at least 93%, at least 94%, at least 95%, at least 96%, at least 97%, at least 98%, at least 99% or 100%) identity to SEQ ID NO: 228. In some aspects, a polypeptide provided herein comprises or consists of an amino acid sequence having at least 80% (such as at least 85%, at least 90%, at least 91%, at least 92%, at least 93%, at least 94%, at least 95%, at least 96%, at least 97%, at least 98%, at least 99% or 100%) identity to SEQ ID NO: 229. In some aspects, a polypeptide provided herein comprises or consists of an amino acid sequence having at least 80% (such as at least 85%, at least 90%, at least 91%, at least 92%, at least 93%, at least 94%, at least 95%, at least 96%, at least 97%, at least 98%, at least 99% or 100%) identity to SEQ ID NO: 230. In some aspects, a polypeptide provided herein comprises or consists of an amino acid sequence having at least 80% (such as at least 85%, at least 90%, at least 91%, at least 92%, at least 93%, at least 94%, at least 95%, at least 96%, at least 97%, at least 98%, at least 99% or 100%) identity to SEQ ID NO: 231. In some aspects, a polypeptide provided herein comprises or consists of an amino acid sequence having at least 80% (such as at least 85%, at least 90%, at least 91%, at least 92%, at least 93%, at least 94%, at least 95%, at least 96%, at least 97%, at least 98%, at least 99% or 100%) identity to SEQ ID NO: 232. In some aspects, a polypeptide provided herein comprises or consists of an amino acid sequence having at least 80% (such as at least 85%, at least 90%, at least 91%, at least 92%, at least 93%, at least 94%, at least 95%, at least 96%, at least 97%, at least 98%, at least 99% or 100%) identity to SEQ ID NO: 233. In some aspects, a polypeptide provided herein comprises or consists of an amino acid sequence having at least 80% (such as at least 85%, at least 90%, at least 91%, at least 92%, at least 93%, at least 94%, at least 95%, at least 96%, at least 97%, at least 98%, at least 99% or 100%) identity to SEQ ID NO: 234. In some aspects, a polypeptide provided herein comprises or consists of an amino acid sequence having at least 80% (such as at least 85%, at least 90%, at least 91%, at least 92%, at least 93%, at least 94%, at least 95%, at least 96%, at least 97%, at least 98%, at least 99% or 100%) identity to SEQ ID NO: 235. In some aspects, a polypeptide provided herein comprises or consists of an amino acid sequence having at least 80% (such as at least 85%, at least 90%, at least 91%, at least 92%, at least 93%, at least 94%, at least 95%, at least 96%, at least 97%, at least 98%, at least 99% or 100%) identity to SEQ ID NO: 236. In some aspects, a polypeptide provided herein comprises or consists of an amino acid sequence having at least 80% (such as at least 85%, at least 90%, at least 91%, at least 92%, at least 93%, at least 94%, at least 95%, at least 96%, at least 97%, at least 98%, at least 99% or 100%) identity to SEQ ID NO: 237. In some aspects, a polypeptide provided herein comprises or consists of an amino acid sequence having at least 80% (such as at least 85%, at least 90%, at least 91%, at least 92%, at least 93%, at least 94%, at least 95%, at least 96%, at least 97%, at least 98%, at least 99% or 100%) identity to SEQ ID NO: 238. In some aspects, a polypeptide provided herein comprises or consists of an amino acid sequence having at least 80% (such as at least 85%, at least 90%, at least 91%, at least 92%, at least 93%, at least 94%, at least 95%, at least 96%, at least 97%, at least 98%, at least 99% or 100%) identity to SEQ ID NO: 239. In some aspects, a polypeptide provided herein comprises or consists of an amino acid sequence having at least 80% (such as at least 85%, at least 90%, at least 91%, at least 92%, at least 93%, at least 94%, at least 95%, at least 96%, at least 97%, at least 98%, at least 99% or 100%) identity to SEQ ID NO: 240. In some aspects, a polypeptide provided herein comprises or consists of an amino acid sequence having at least 80% (such as at least 85%, at least 90%, at least 91%, at least 92%, at least 93%, at least 94%, at least 95%, at least 96%, at least 97%, at least 98%, at least 99% or 100%) identity to SEQ ID NO: 241. In some aspects, a polypeptide provided herein comprises or consists of an amino acid sequence having at least 80% (such as at least 85%, at least 90%, at least 91%, at least 92%, at least 93%, at least 94%, at least 95%, at least 96%, at least 97%, at least 98%, at least 99% or 100%) identity to SEQ ID NO: 242. In some aspects, a polypeptide provided herein comprises or consists of an amino acid sequence having at least 80% (such as at least 85%, at least 90%, at least 91%, at least 92%, at least 93%, at least 94%, at least 95%, at least 96%, at least 97%, at least 98%, at least 99% or 100%) identity to SEQ ID NO: 243. In some aspects, a polypeptide provided herein comprises or consists of an amino acid sequence having at least 80% (such as at least 85%, at least 90%, at least 91%, at least 92%, at least 93%, at least 94%, at least 95%, at least 96%, at least 97%, at least 98%, at least 99% or 100%) identity to SEQ ID NO: 244. In some aspects, a polypeptide provided herein comprises or consists of an amino acid sequence having at least 80% (such as at least 85%, at least 90%, at least 91%, at least 92%, at least 93%, at least 94%, at least 95%, at least 96%, at least 97%, at least 98%, at least 99% or 100%) identity to SEQ ID NO: 245. In some aspects, a polypeptide provided herein comprises or consists of an amino acid sequence having at least 80% (such as at least 85%, at least 90%, at least 91%, at least 92%, at least 93%, at least 94%, at least 95%, at least 96%, at least 97%, at least 98%, at least 99% or 100%) identity to SEQ ID NO: 246. In some aspects, a polypeptide provided herein comprises or consists of an amino acid sequence having at least 80% (such as at least 85%, at least 90%, at least 91%, at least 92%, at least 93%, at least 94%, at least 95%, at least 96%, at least 97%, at least 98%, at least 99% or 100%) identity to SEQ ID NO: 247. In some aspects, a polypeptide provided herein comprises or consists of an amino acid sequence having at least 80% (such as at least 85%, at least 90%, at least 91%, at least 92%, at least 93%, at least 94%, at least 95%, at least 96%, at least 97%, at least 98%, at least 99% or 100%) identity to SEQ ID NO: 248. In some aspects, a polypeptide provided herein comprises or consists of an amino acid sequence having at least 80% (such as at least 85%, at least 90%, at least 91%, at least 92%, at least 93%, at least 94%, at least 95%, at least 96%, at least 97%, at least 98%, at least 99% or 100%) identity to SEQ ID NO: 249. In some aspects, a polypeptide provided herein comprises or consists of an amino acid sequence having at least 80% (such as at least 85%, at least 90%, at least 91%, at least 92%, at least 93%, at least 94%, at least 95%, at least 96%, at least 97%, at least 98%, at least 99% or 100%) identity to SEQ ID NO: 250. In some aspects, a polypeptide provided herein comprises or consists of an amino acid sequence having at least 80% (such as at least 85%, at least 90%, at least 91%, at least 92%, at least 93%, at least 94%, at least 95%, at least 96%, at least 97%, at least 98%, at least 99% or 100%) identity to SEQ ID NO: 251. In some aspects, a polypeptide provided herein comprises or consists of an amino acid sequence having at least 80% (such as at least 85%, at least 90%, at least 91%, at least 92%, at least 93%, at least 94%, at least 95%, at least 96%, at least 97%, at least 98%, at least 99% or 100%) identity to SEQ ID NO: 252. In some aspects, a polypeptide provided herein comprises or consists of an amino acid sequence having at least 80% (such as at least 85%, at least 90%, at least 91%, at least 92%, at least 93%, at least 94%, at least 95%, at least 96%, at least 97%, at least 98%, at least 99% or 100%) identity to SEQ ID NO: 253. In some aspects, a polypeptide provided herein comprises or consists of an amino acid sequence having at least 80% (such as at least 85%, at least 90%, at least 91%, at least 92%, at least 93%, at least 94%, at least 95%, at least 96%, at least 97%, at least 98%, at least 99% or 100%) identity to SEQ ID NO: 254. In some aspects, a polypeptide provided herein comprises or consists of an amino acid sequence having at least 80% (such as at least 85%, at least 90%, at least 91%, at least 92%, at least 93%, at least 94%, at least 95%, at least 96%, at least 97%, at least 98%, at least 99% or 100%) identity to SEQ ID NO: 255. In some aspects, a polypeptide provided herein comprises or consists of an amino acid sequence having at least 80% (such as at least 85%, at least 90%, at least 91%, at least 92%, at least 93%, at least 94%, at least 95%, at least 96%, at least 97%, at least 98%, at least 99% or 100%) identity to SEQ ID NO: 256. In some aspects, a polypeptide provided herein comprises or consists of an amino acid sequence having at least 80% (such as at least 85%, at least 90%, at least 91%, at least 92%, at least 93%, at least 94%, at least 95%, at least 96%, at least 97%, at least 98%, at least 99% or 100%) identity to SEQ ID NO: 257. In some aspects, a polypeptide provided herein comprises or consists of an amino acid sequence having at least 80% (such as at least 85%, at least 90%, at least 91%, at least 92%, at least 93%, at least 94%, at least 95%, at least 96%, at least 97%, at least 98%, at least 99% or 100%) identity to SEQ ID NO: 258. In some aspects, a polypeptide provided herein comprises or consists of an amino acid sequence having at least 80% (such as at least 85%, at least 90%, at least 91%, at least 92%, at least 93%, at least 94%, at least 95%, at least 96%, at least 97%, at least 98%, at least 99% or 100%) identity to SEQ ID NO: 291. In some aspects, a polypeptide provided herein comprises or consists of an amino acid sequence having at least 80% (such as at least 85%, at least 90%, at least 91%, at least 92%, at least 93%, at least 94%, at least 95%, at least 96%, at least 97%, at least 98%, at least 99% or 100%) identity to SEQ ID NO: 295. In some aspects, a polypeptide provided herein comprises or consists of an amino acid sequence having at least 80% (such as at least 85%, at least 90%, at least 91%, at least 92%, at least 93%, at least 94%, at least 95%, at least 96%, at least 97%, at least 98%, at least 99% or 100%) identity to SEQ ID NO: 297. In some aspects, a polypeptide provided herein comprises or consists of an amino acid sequence having at least 80% (such as at least 85%, at least 90%, at least 91%, at least 92%, at least 93%, at least 94%, at least 95%, at least 96%, at least 97%, at least 98%, at least 99% or 100%) identity to SEQ ID NO: 299. In some aspects, a polypeptide provided herein comprises or consists of an amino acid sequence having at least 80% (such as at least 85%, at least 90%, at least 91%, at least 92%, at least 93%, at least 94%, at least 95%, at least 96%, at least 97%, at least 98%, at least 99% or 100%) identity to SEQ ID NO: 301. In some aspects, a polypeptide provided herein comprises or consists of an amino acid sequence having at least 80% (such as at least 85%, at least 90%, at least 91%, at least 92%, at least 93%, at least 94%, at least 95%, at least 96%, at least 97%, at least 98%, at least 99% or 100%) identity to SEQ ID NO: 303. In some aspects, a polypeptide provided herein comprises or consists of an amino acid sequence having at least 80% (such as at least 85%, at least 90%, at least 91%, at least 92%, at least 93%, at least 94%, at least 95%, at least 96%, at least 97%, at least 98%, at least 99% or 100%) identity to SEQ ID NO: 305. In some aspects, a polypeptide provided herein comprises or consists of an amino acid sequence having at least 80% (such as at least 85%, at least 90%, at least 91%, at least 92%, at least 93%, at least 94%, at least 95%, at least 96%, at least 97%, at least 98%, at least 99% or 100%) identity to SEQ ID NO: 307. In some aspects, a polypeptide provided herein comprises or consists of an amino acid sequence having at least 80% (such as at least 85%, at least 90%, at least 91%, at least 92%, at least 93%, at least 94%, at least 95%, at least 96%, at least 97%, at least 98%, at least 99% or 100%) identity to SEQ ID NO: 309. In some aspects, a polypeptide provided herein comprises or consists of an amino acid sequence having at least 80% (such as at least 85%, at least 90%, at least 91%, at least 92%, at least 93%, at least 94%, at least 95%, at least 96%, at least 97%, at least 98%, at least 99% or 100%) identity to SEQ ID NO: 311. In some aspects, a polypeptide provided herein comprises or consists of an amino acid sequence having at least 80% (such as at least 85%, at least 90%, at least 91%, at least 92%, at least 93%, at least 94%, at least 95%, at least 96%, at least 97%, at least 98%, at least 99% or 100%) identity to SEQ ID NO: 313. In some aspects, a polypeptide provided herein comprises or consists of an amino acid sequence having at least 80% (such as at least 85%, at least 90%, at least 91%, at least 92%, at least 93%, at least 94%, at least 95%, at least 96%, at least 97%, at least 98%, at least 99% or 100%) identity to SEQ ID NO: 315. In some aspects, a polypeptide provided herein comprises or consists of an amino acid sequence having at least 80% (such as at least 85%, at least 90%, at least 91%, at least 92%, at least 93%, at least 94%, at least 95%, at least 96%, at least 97%, at least 98%, at least 99% or 100%) identity to SEQ ID NO: 317. In some aspects, a polypeptide provided herein comprises or consists of an amino acid sequence having at least 80% (such as at least 85%, at least 90%, at least 91%, at least 92%, at least 93%, at least 94%, at least 95%, at least 96%, at least 97%, at least 98%, at least 99% or 100%) identity to SEQ ID NO: 319. In some aspects, a polypeptide provided herein comprises or consists of an amino acid sequence having at least 80% (such as at least 85%, at least 90%, at least 91%, at least 92%, at least 93%, at least 94%, at least 95%, at least 96%, at least 97%, at least 98%, at least 99% or 100%) identity to SEQ ID NO: 321. In some aspects, a polypeptide provided herein comprises or consists of an amino acid sequence having at least 80% (such as at least 85%, at least 90%, at least 91%, at least 92%, at least 93%, at least 94%, at least 95%, at least 96%, at least 97%, at least 98%, at least 99% or 100%) identity to SEQ ID NO: 323. In some aspects, a polypeptide provided herein comprises or consists of an amino acid sequence having at least 80% (such as at least 85%, at least 90%, at least 91%, at least 92%, at least 93%, at least 94%, at least 95%, at least 96%, at least 97%, at least 98%, at least 99% or 100%) identity to SEQ ID NO: 325. In some aspects, a polypeptide provided herein comprises or consists of an amino acid sequence having at least 80% (such as at least 85%, at least 90%, at least 91%, at least 92%, at least 93%, at least 94%, at least 95%, at least 96%, at least 97%, at least 98%, at least 99% or 100%) identity to SEQ ID NO: 327. In some aspects, a polypeptide provided herein comprises or consists of an amino acid sequence having at least 80% (such as at least 85%, at least 90%, at least 91%, at least 92%, at least 93%, at least 94%, at least 95%, at least 96%, at least 97%, at least 98%, at least 99% or 100%) identity to SEQ ID NO: 329. In some aspects, a polypeptide provided herein comprises or consists of an amino acid sequence having at least 80% (such as at least 85%, at least 90%, at least 91%, at least 92%, at least 93%, at least 94%, at least 95%, at least 96%, at least 97%, at least 98%, at least 99% or 100%) identity to SEQ ID NO: 331. In some aspects, a polypeptide provided herein comprises or consists of an amino acid sequence having at least 80% (such as at least 85%, at least 90%, at least 91%, at least 92%, at least 93%, at least 94%, at least 95%, at least 96%, at least 97%, at least 98%, at least 99% or 100%) identity to SEQ ID NO: 333. In some aspects, a polypeptide provided herein comprises or consists of an amino acid sequence having at least 80% (such as at least 85%, at least 90%, at least 91%, at least 92%, at least 93%, at least 94%, at least 95%, at least 96%, at least 97%, at least 98%, at least 99% or 100%) identity to SEQ ID NO: 335. In some aspects, a polypeptide provided herein comprises or consists of an amino acid sequence having at least 80% (such as at least 85%, at least 90%, at least 91%, at least 92%, at least 93%, at least 94%, at least 95%, at least 96%, at least 97%, at least 98%, at least 99% or 100%) identity to SEQ ID NO: 337. In some aspects, a polypeptide provided herein comprises or consists of an amino acid sequence having at least 80% (such as at least 85%, at least 90%, at least 91%, at least 92%, at least 93%, at least 94%, at least 95%, at least 96%, at least 97%, at least 98%, at least 99% or 100%) identity to SEQ ID NO: 339. In some aspects, a polypeptide provided herein comprises or consists of an amino acid sequence having at least 80% (such as at least 85%, at least 90%, at least 91%, at least 92%, at least 93%, at least 94%, at least 95%, at least 96%, at least 97%, at least 98%, at least 99% or 100%) identity to SEQ ID NO: 341. In some aspects, a polypeptide provided herein comprises or consists of an amino acid sequence having at least 80% (such as at least 85%, at least 90%, at least 91%, at least 92%, at least 93%, at least 94%, at least 95%, at least 96%, at least 97%, at least 98%, at least 99% or 100%) identity to SEQ ID NO: 343. In some aspects, a polypeptide provided herein comprises or consists of an amino acid sequence having at least 80% (such as at least 85%, at least 90%, at least 91%, at least 92%, at least 93%, at least 94%, at least 95%, at least 96%, at least 97%, at least 98%, at least 99% or 100%) identity to SEQ ID NO: 345. In some aspects, a polypeptide provided herein comprises or consists of an amino acid sequence having at least 80% (such as at least 85%, at least 90%, at least 91%, at least 92%, at least 93%, at least 94%, at least 95%, at least 96%, at least 97%, at least 98%, at least 99% or 100%) identity to SEQ ID NO: 347. In some aspects, a polypeptide provided herein comprises or consists of an amino acid sequence having at least 80% (such as at least 85%, at least 90%, at least 91%, at least 92%, at least 93%, at least 94%, at least 95%, at least 96%, at least 97%, at least 98%, at least 99% or 100%) identity to SEQ ID NO: 3490 In some aspects, a polypeptide provided herein comprises or consists of an amino acid sequence having at least 80% (such as at least 85%, at least 90%, at least 91%, at least 92%, at least 93%, at least 94%, at least 95%, at least 96%, at least 97%, at least 98%, at least 99% or 100%) identity to SEQ ID NO: 351. In some aspects, a polypeptide provided herein comprises or consists of an amino acid sequence having at least 80% (such as at least 85%, at least 90%, at least 91%, at least 92%, at least 93%, at least 94%, at least 95%, at least 96%, at least 97%, at least 98%, at least 99% or 100%) identity to SEQ ID NO: 353. In some aspects, a polypeptide provided herein comprises or consists of an amino acid sequence having at least 80% (such as at least 85%, at least 90%, at least 91%, at least 92%, at least 93%, at least 94%, at least 95%, at least 96%, at least 97%, at least 98%, at least 99% or 100%) identity to SEQ ID NO: 355. In some aspects, a polypeptide provided herein comprises or consists of an amino acid sequence having at least 80% (such as at least 85%, at least 90%, at least 91%, at least 92%, at least 93%, at least 94%, at least 95%, at least 96%, at least 97%, at least 98%, at least 99% or 100%) identity to SEQ ID NO: 357. In some aspects, a polypeptide provided herein comprises or consists of an amino acid sequence having at least 80% (such as at least 85%, at least 90%, at least 91%, at least 92%, at least 93%, at least 94%, at least 95%, at least 96%, at least 97%, at least 98%, at least 99% or 100%) identity to SEQ ID NO: 359. In some aspects, a polypeptide provided herein comprises or consists of an amino acid sequence having at least 80% (such as at least 85%, at least 90%, at least 91%, at least 92%, at least 93%, at least 94%, at least 95%, at least 96%, at least 97%, at least 98%, at least 99% or 100%) identity to SEQ ID NO: 361. In some aspects, a polypeptide provided herein comprises or consists of an amino acid sequence having at least 80% (such as at least 85%, at least 90%, at least 91%, at least 92%, at least 93%, at least 94%, at least 95%, at least 96%, at least 97%, at least 98%, at least 99% or 100%) identity to SEQ ID NO: 363 In some aspects, a polypeptide provided herein comprises or consists of an amino acid sequence having at least 80% (such as at least 85%, at least 90%, at least 91%, at least 92%, at least 93%, at least 94%, at least 95%, at least 96%, at least 97%, at least 98%, at least 99% or 100%) identity to SEQ ID NO: 365. In some aspects, a polypeptide provided herein comprises or consists of an amino acid sequence having at least 80% (such as at least 85%, at least 90%, at least 91%, at least 92%, at least 93%, at least 94%, at least 95%, at least 96%, at least 97%, at least 98%, at least 99% or 100%) identity to SEQ ID NO: 367. In some aspects, a polypeptide provided herein comprises or consists of an amino acid sequence having at least 80% (such as at least 85%, at least 90%, at least 91%, at least 92%, at least 93%, at least 94%, at least 95%, at least 96%, at least 97%, at least 98%, at least 99% or 100%) identity to SEQ ID NO: 369. In some aspects, a polypeptide provided herein comprises or consists of an amino acid sequence having at least 80% (such as at least 85%, at least 90%, at least 91%, at least 92%, at least 93%, at least 94%, at least 95%, at least 96%, at least 97%, at least 98%, at least 99% or 100%) identity to SEQ ID NO: 371. In some aspects, a polypeptide provided herein comprises or consists of an amino acid sequence having at least 80% (such as at least 85%, at least 90%, at least 91%, at least 92%, at least 93%, at least 94%, at least 95%, at least 96%, at least 97%, at least 98%, at least 99% or 100%) identity to SEQ ID NO: 373. In some aspects, a polypeptide provided herein comprises or consists of an amino acid sequence having at least 80% (such as at least 85%, at least 90%, at least 91%, at least 92%, at least 93%, at least 94%, at least 95%, at least 96%, at least 97%, at least 98%, at least 99% or 100%) identity to SEQ ID NO: 379. In some aspects, a polypeptide provided herein comprises or consists of an amino acid sequence having at least 80% (such as at least 85%, at least 90%, at least 91%, at least 92%, at least 93%, at least 94%, at least 95%, at least 96%, at least 97%, at least 98%, at least 99% or 100%) identity to SEQ ID NO: 381. In some aspects, a polypeptide provided herein comprises or consists of an amino acid sequence having at least 80% (such as at least 85%, at least 90%, at least 91%, at least 92%, at least 93%, at least 94%, at least 95%, at least 96%, at least 97%, at least 98%, at least 99% or 100%) identity to SEQ ID NO: 383. In some aspects, a polypeptide provided herein comprises or consists of an amino acid sequence having at least 80% (such as at least 85%, at least 90%, at least 91%, at least 92%, at least 93%, at least 94%, at least 95%, at least 96%, at least 97%, at least 98%, at least 99% or 100%) identity to SEQ ID NO: 385. In some aspects, a polypeptide provided herein comprises or consists of an amino acid sequence having at least 80% (such as at least 85%, at least 90%, at least 91%, at least 92%, at least 93%, at least 94%, at least 95%, at least 96%, at least 97%, at least 98%, at least 99% or 100%) identity to SEQ ID NO: 387. In some aspects, a polypeptide provided herein comprises or consists of an amino acid sequence having at least 80% (such as at least 85%, at least 90%, at least 91%, at least 92%, at least 93%, at least 94%, at least 95%, at least 96%, at least 97%, at least 98%, at least 99% or 100%) identity to SEQ ID NO: 389. In some aspects, a polypeptide provided herein comprises or consists of an amino acid sequence having at least 80% (such as at least 85%, at least 90%, at least 91%, at least 92%, at least 93%, at least 94%, at least 95%, at least 96%, at least 97%, at least 98%, at least 99% or 100%) identity to SEQ ID NO: 391. In some aspects, a polypeptide provided herein comprises or consists of an amino acid sequence having at least 80% (such as at least 85%, at least 90%, at least 91%, at least 92%, at least 93%, at least 94%, at least 95%, at least 96%, at least 97%, at least 98%, at least 99% or 100%) identity to SEQ ID NO: 393. In some aspects, a polypeptide provided herein comprises or consists of an amino acid sequence having at least 80% (such as at least 85%, at least 90%, at least 91%, at least 92%, at least 93%, at least 94%, at least 95%, at least 96%, at least 97%, at least 98%, at least 99% or 100%) identity to SEQ ID NO: 395. In some aspects, a polypeptide provided herein comprises or consists of an amino acid sequence having at least 80% (such as at least 85%, at least 90%, at least 91%, at least 92%, at least 93%, at least 94%, at least 95%, at least 96%, at least 97%, at least 98%, at least 99% or 100%) identity to SEQ ID NO: 397. In some aspects, a polypeptide provided herein comprises or consists of an amino acid sequence having at least 80% (such as at least 85%, at least 90%, at least 91%, at least 92%, at least 93%, at least 94%, at least 95%, at least 96%, at least 97%, at least 98%, at least 99% or 100%) identity to SEQ ID NO: 399. In some aspects, a polypeptide provided herein comprises or consists of an amino acid sequence having at least 80% (such as at least 85%, at least 90%, at least 91%, at least 92%, at least 93%, at least 94%, at least 95%, at least 96%, at least 97%, at least 98%, at least 99% or 100%) identity to SEQ ID NO: 401. In some aspects, a polypeptide provided herein comprises or consists of an amino acid sequence having at least 80% (such as at least 85%, at least 90%, at least 91%, at least 92%, at least 93%, at least 94%, at least 95%, at least 96%, at least 97%, at least 98%, at least 99% or 100%) identity to SEQ ID NO: 403. In some aspects, a polypeptide provided herein comprises or consists of an amino acid sequence having at least 80% (such as at least 85%, at least 90%, at least 91%, at least 92%, at least 93%, at least 94%, at least 95%, at least 96%, at least 97%, at least 98%, at least 99% or 100%) identity to SEQ ID NO: 405. In some aspects, a polypeptide provided herein comprises or consists of an amino acid sequence having at least 80% (such as at least 85%, at least 90%, at least 91%, at least 92%, at least 93%, at least 94%, at least 95%, at least 96%, at least 97%, at least 98%, at least 99% or 100%) identity to SEQ ID NO: 407. In some aspects, a polypeptide provided herein comprises or consists of an amino acid sequence having at least 80% (such as at least 85%, at least 90%, at least 91%, at least 92%, at least 93%, at least 94%, at least 95%, at least 96%, at least 97%, at least 98%, at least 99% or 100%) identity to SEQ ID NO: 409. In some aspects, a polypeptide provided herein comprises or consists of an amino acid sequence having at least 80% (such as at least 85%, at least 90%, at least 91%, at least 92%, at least 93%, at least 94%, at least 95%, at least 96%, at least 97%, at least 98%, at least 99% or 100%) identity to SEQ ID NO: 411. In some aspects, a polypeptide provided herein comprises or consists of an amino acid sequence having at least 80% (such as at least 85%, at least 90%, at least 91%, at least 92%, at least 93%, at least 94%, at least 95%, at least 96%, at least 97%, at least 98%, at least 99% or 100%) identity to SEQ ID NO: 413. In some aspects, a polypeptide provided herein comprises or consists of an amino acid sequence having at least 80% (such as at least 85%, at least 90%, at least 91%, at least 92%, at least 93%, at least 94%, at least 95%, at least 96%, at least 97%, at least 98%, at least 99% or 100%) identity to SEQ ID NO: 415. In some aspects, a polypeptide provided herein comprises or consists of an amino acid sequence having at least 80% (such as at least 85%, at least 90%, at least 91%, at least 92%, at least 93%, at least 94%, at least 95%, at least 96%, at least 97%, at least 98%, at least 99% or 100%) identity to SEQ ID NO: 417. In some aspects, a polypeptide provided herein comprises or consists of an amino acid sequence having at least 80% (such as at least 85%, at least 90%, at least 91%, at least 92%, at least 93%, at least 94%, at least 95%, at least 96%, at least 97%, at least 98%, at least 99% or 100%) identity to SEQ ID NO: 419. In some aspects, a polypeptide provided herein comprises or consists of an amino acid sequence having at least 80% (such as at least 85%, at least 90%, at least 91%, at least 92%, at least 93%, at least 94%, at least 95%, at least 96%, at least 97%, at least 98%, at least 99% or 100%) identity to SEQ ID NO: 421. In some aspects, a polypeptide provided herein comprises or consists of an amino acid sequence having at least 80% (such as at least 85%, at least 90%, at least 91%, at least 92%, at least 93%, at least 94%, at least 95%, at least 96%, at least 97%, at least 98%, at least 99% or 100%) identity to SEQ ID NO: 423. In some aspects, a polypeptide provided herein comprises or consists of an amino acid sequence having at least 80% (such as at least 85%, at least 90%, at least 91%, at least 92%, at least 93%, at least 94%, at least 95%, at least 96%, at least 97%, at least 98%, at least 99% or 100%) identity to SEQ ID NO: 425. In some aspects, a polypeptide provided herein comprises or consists of an amino acid sequence having at least 80% (such as at least 85%, at least 90%, at least 91%, at least 92%, at least 93%, at least 94%, at least 95%, at least 96%, at least 97%, at least 98%, at least 99% or 100%) identity to SEQ ID NO: 427. In some aspects, a polypeptide provided herein comprises or consists of an amino acid sequence having at least 80% (such as at least 85%, at least 90%, at least 91%, at least 92%, at least 93%, at least 94%, at least 95%, at least 96%, at least 97%, at least 98%, at least 99% or 100%) identity to SEQ ID NO: 429. In some aspects, a polypeptide provided herein comprises or consists of an amino acid sequence having at least 80% (such as at least 85%, at least 90%, at least 91%, at least 92%, at least 93%, at least 94%, at least 95%, at least 96%, at least 97%, at least 98%, at least 99% or 100%) identity to SEQ ID NO: 431. In some aspects, a polypeptide provided herein comprises or consists of an amino acid sequence having at least 80% (such as at least 85%, at least 90%, at least 91%, at least 92%, at least 93%, at least 94%, at least 95%, at least 96%, at least 97%, at least 98%, at least 99% or 100%) identity to SEQ ID NO: 433. In some aspects, a polypeptide provided herein comprises or consists of an amino acid sequence having at least 80% (such as at least 85%, at least 90%, at least 91%, at least 92%, at least 93%, at least 94%, at least 95%, at least 96%, at least 97%, at least 98%, at least 99% or 100%) identity to SEQ ID NO: 435. In some aspects, a polypeptide provided herein comprises or consists of an amino acid sequence having at least 80% (such as at least 85%, at least 90%, at least 91%, at least 92%, at least 93%, at least 94%, at least 95%, at least 96%, at least 97%, at least 98%, at least 99% or 100%) identity to SEQ ID NO: 437. In some aspects, a polypeptide provided herein comprises or consists of an amino acid sequence having at least 80% (such as at least 85%, at least 90%, at least 91%, at least 92%, at least 93%, at least 94%, at least 95%, at least 96%, at least 97%, at least 98%, at least 99% or 100%) identity to SEQ ID NO: 439. In some aspects, a polypeptide provided herein comprises or consists of an amino acid sequence having at least 80% (such as at least 85%, at least 90%, at least 91%, at least 92%, at least 93%, at least 94%, at least 95%, at least 96%, at least 97%, at least 98%, at least 99% or 100%) identity to SEQ ID NO: 441. In some aspects, a polypeptide provided herein comprises or consists of an amino acid sequence having at least 80% (such as at least 85%, at least 90%, at least 91%, at least 92%, at least 93%, at least 94%, at least 95%, at least 96%, at least 97%, at least 98%, at least 99% or 100%) identity to SEQ ID NO: 443. In some aspects, a polypeptide provided herein comprises or consists of an amino acid sequence having at least 80% (such as at least 85%, at least 90%, at least 91%, at least 92%, at least 93%, at least 94%, at least 95%, at least 96%, at least 97%, at least 98%, at least 99% or 100%) identity to SEQ ID NO: 445. In some aspects, a polypeptide provided herein comprises or consists of an amino acid sequence having at least 80% (such as at least 85%, at least 90%, at least 91%, at least 92%, at least 93%, at least 94%, at least 95%, at least 96%, at least 97%, at least 98%, at least 99% or 100%) identity to SEQ ID NO: 447. In some aspects, a polypeptide provided herein comprises or consists of an amino acid sequence having at least 80% (such as at least 85%, at least 90%, at least 91%, at least 92%, at least 93%, at least 94%, at least 95%, at least 96%, at least 97%, at least 98%, at least 99% or 100%) identity to SEQ ID NO: 449. In some aspects, a polypeptide provided herein comprises or consists of an amino acid sequence having at least 80% (such as at least 85%, at least 90%, at least 91%, at least 92%, at least 93%, at least 94%, at least 95%, at least 96%, at least 97%, at least 98%, at least 99% or 100%) identity to SEQ ID NO: 451. In some aspects, a polypeptide provided herein comprises or consists of an amino acid sequence having at least 80% (such as at least 85%, at least 90%, at least 91%, at least 92%, at least 93%, at least 94%, at least 95%, at least 96%, at least 97%, at least 98%, at least 99% or 100%) identity to SEQ ID NO: 453. In some aspects, a polypeptide provided herein comprises or consists of an amino acid sequence having at least 80% (such as at least 85%, at least 90%, at least 91%, at least 92%, at least 93%, at least 94%, at least 95%, at least 96%, at least 97%, at least 98%, at least 99% or 100%) identity to SEQ ID NO: 455. In some aspects, a polypeptide provided herein comprises or consists of an amino acid sequence having at least 80% (such as at least 85%, at least 90%, at least 91%, at least 92%, at least 93%, at least 94%, at least 95%, at least 96%, at least 97%, at least 98%, at least 99% or 100%) identity to SEQ ID NO: 457. In some aspects, a polypeptide provided herein comprises or consists of an amino acid sequence having at least 80% (such as at least 85%, at least 90%, at least 91%, at least 92%, at least 93%, at least 94%, at least 95%, at least 96%, at least 97%, at least 98%, at least 99% or 100%) identity to SEQ ID NO: 459. In some aspects, a polypeptide provided herein comprises or consists of an amino acid sequence having at least 80% (such as at least 85%, at least 90%, at least 91%, at least 92%, at least 93%, at least 94%, at least 95%, at least 96%, at least 97%, at least 98%, at least 99% or 100%) identity to SEQ ID NO: 461. In some aspects, a polypeptide provided herein comprises or consists of an amino acid sequence having at least 80% (such as at least 85%, at least 90%, at least 91%, at least 92%, at least 93%, at least 94%, at least 95%, at least 96%, at least 97%, at least 98%, at least 99% or 100%) identity to SEQ ID NO: 463. In some aspects, a polypeptide provided herein comprises or consists of an amino acid sequence having at least 80% (such as at least 85%, at least 90%, at least 91%, at least 92%, at least 93%, at least 94%, at least 95%, at least 96%, at least 97%, at least 98%, at least 99% or 100%) identity to SEQ ID NO: 465. In some aspects, a polypeptide provided herein comprises or consists of an amino acid sequence having at least 80% (such as at least 85%, at least 90%, at least 91%, at least 92%, at least 93%, at least 94%, at least 95%, at least 96%, at least 97%, at least 98%, at least 99% or 100%) identity to SEQ ID NO: 467. In some aspects, a polypeptide provided herein comprises or consists of an amino acid sequence having at least 80% (such as at least 85%, at least 90%, at least 91%, at least 92%, at least 93%, at least 94%, at least 95%, at least 96%, at least 97%, at least 98%, at least 99% or 100%) identity to SEQ ID NO: 469. In some aspects, a polypeptide provided herein comprises or consists of an amino acid sequence having at least 80% (such as at least 85%, at least 90%, at least 91%, at least 92%, at least 93%, at least 94%, at least 95%, at least 96%, at least 97%, at least 98%, at least 99% or 100%) identity to SEQ ID NO: 471. In some aspects, a polypeptide provided herein comprises or consists of an amino acid sequence having at least 80% (such as at least 85%, at least 90%, at least 91%, at least 92%, at least 93%, at least 94%, at least 95%, at least 96%, at least 97%, at least 98%, at least 99% or 100%) identity to SEQ ID NO: 473. In some aspects, a polypeptide provided herein comprises or consists of an amino acid sequence having at least 80% (such as at least 85%, at least 90%, at least 91%, at least 92%, at least 93%, at least 94%, at least 95%, at least 96%, at least 97%, at least 98%, at least 99% or 100%) identity to SEQ ID NO: 475. In some aspects, a polypeptide provided herein comprises or consists of an amino acid sequence having at least 80% (such as at least 85%, at least 90%, at least 91%, at least 92%, at least 93%, at least 94%, at least 95%, at least 96%, at least 97%, at least 98%, at least 99% or 100%) identity to SEQ ID NO: 477. In some aspects, a polypeptide provided herein comprises or consists of an amino acid sequence having at least 80% (such as at least 85%, at least 90%, at least 91%, at least 92%, at least 93%, at least 94%, at least 95%, at least 96%, at least 97%, at least 98%, at least 99% or 100%) identity to SEQ ID NO: 479. In some aspects, a polypeptide provided herein comprises or consists of an amino acid sequence having at least 80% (such as at least 85%, at least 90%, at least 91%, at least 92%, at least 93%, at least 94%, at least 95%, at least 96%, at least 97%, at least 98%, at least 99% or 100%) identity to SEQ ID NO: 481. In some aspects, a polypeptide provided herein comprises or consists of an amino acid sequence having at least 80% (such as at least 85%, at least 90%, at least 91%, at least 92%, at least 93%, at least 94%, at least 95%, at least 96%, at least 97%, at least 98%, at least 99% or 100%) identity to SEQ ID NO: 483. In some aspects, a polypeptide provided herein comprises or consists of an amino acid sequence having at least 80% (such as at least 85%, at least 90%, at least 91%, at least 92%, at least 93%, at least 94%, at least 95%, at least 96%, at least 97%, at least 98%, at least 99% or 100%) identity to SEQ ID NO: 485. In some aspects, a polypeptide provided herein comprises or consists of an amino acid sequence having at least 80% (such as at least 85%, at least 90%, at least 91%, at least 92%, at least 93%, at least 94%, at least 95%, at least 96%, at least 97%, at least 98%, at least 99% or 100%) identity to SEQ ID NO: 487. In some aspects, a polypeptide provided herein comprises or consists of an amino acid sequence having at least 80% (such as at least 85%, at least 90%, at least 91%, at least 92%, at least 93%, at least 94%, at least 95%, at least 96%, at least 97%, at least 98%, at least 99% or 100%) identity to SEQ ID NO: 489. In some aspects, a polypeptide provided herein comprises or consists of an amino acid sequence having at least 80% (such as at least 85%, at least 90%, at least 91%, at least 92%, at least 93%, at least 94%, at least 95%, at least 96%, at least 97%, at least 98%, at least 99% or 100%) identity to SEQ ID NO: 491. In some aspects, a polypeptide provided herein comprises or consists of an amino acid sequence having at least 80% (such as at least 85%, at least 90%, at least 91%, at least 92%, at least 93%, at least 94%, at least 95%, at least 96%, at least 97%, at least 98%, at least 99% or 100%) identity to SEQ ID NO: 493. In some aspects, a polypeptide provided herein comprises or consists of an amino acid sequence having at least 80% (such as at least 85%, at least 90%, at least 91%, at least 92%, at least 93%, at least 94%, at least 95%, at least 96%, at least 97%, at least 98%, at least 99% or 100%) identity to SEQ ID NO: 495. In some aspects, a polypeptide provided herein comprises or consists of an amino acid sequence having at least 80% (such as at least 85%, at least 90%, at least 91%, at least 92%, at least 93%, at least 94%, at least 95%, at least 96%, at least 97%, at least 98%, at least 99% or 100%) identity to SEQ ID NO: 497. In some aspects, a polypeptide provided herein comprises or consists of an amino acid sequence having at least 80% (such as at least 85%, at least 90%, at least 91%, at least 92%, at least 93%, at least 94%, at least 95%, at least 96%, at least 97%, at least 98%, at least 99% or 100%) identity to SEQ ID NO: 499. In some aspects, a polypeptide provided herein comprises or consists of an amino acid sequence having at least 80% (such as at least 85%, at least 90%, at least 91%, at least 92%, at least 93%, at least 94%, at least 95%, at least 96%, at least 97%, at least 98%, at least 99% or 100%) identity to SEQ ID NO: 501. In some aspects, a polypeptide provided herein comprises or consists of an amino acid sequence having at least 80% (such as at least 85%, at least 90%, at least 91%, at least 92%, at least 93%, at least 94%, at least 95%, at least 96%, at least 97%, at least 98%, at least 99% or 100%) identity to SEQ ID NO: 503. In some aspects, a polypeptide provided herein comprises or consists of an amino acid sequence having at least 80% (such as at least 85%, at least 90%, at least 91%, at least 92%, at least 93%, at least 94%, at least 95%, at least 96%, at least 97%, at least 98%, at least 99% or 100%) identity to SEQ ID NO: 505. In some aspects, a polypeptide provided herein comprises or consists of an amino acid sequence having at least 80% (such as at least 85%, at least 90%, at least 91%, at least 92%, at least 93%, at least 94%, at least 95%, at least 96%, at least 97%, at least 98%, at least 99% or 100%) identity to SEQ ID NO: 711. In some aspects, a polypeptide provided herein comprises or consists of an amino acid sequence having at least 80% (such as at least 85%, at least 90%, at least 91%, at least 92%, at least 93%, at least 94%, at least 95%, at least 96%, at least 97%, at least 98%, at least 99% or 100%) identity to SEQ ID NO: 712. In some aspects, a polypeptide provided herein comprises or consists of an amino acid sequence having at least 80% (such as at least 85%, at least 90%, at least 91%, at least 92%, at least 93%, at least 94%, at least 95%, at least 96%, at least 97%, at least 98%, at least 99% or 100%) identity to SEQ ID NO: 713 In some aspects, a polypeptide provided herein comprises or consists of an amino acid sequence having at least 80% (such as at least 85%, at least 90%, at least 91%, at least 92%, at least 93%, at least 94%, at least 95%, at least 96%, at least 97%, at least 98%, at least 99% or 100%) identity to SEQ ID NO: 714. In some aspects, a polypeptide provided herein comprises or consists of an amino acid sequence having at least 80% (such as at least 85%, at least 90%, at least 91%, at least 92%, at least 93%, at least 94%, at least 95%, at least 96%, at least 97%, at least 98%, at least 99% or 100%) identity to SEQ ID NO: 715. In some aspects, a polypeptide provided herein comprises or consists of an amino acid sequence having at least 80% (such as at least 85%, at least 90%, at least 91%, at least 92%, at least 93%, at least 94%, at least 95%, at least 96%, at least 97%, at least 98%, at least 99% or 100%) identity to SEQ ID NO: 716. In some aspects, a polypeptide provided herein comprises or consists of an amino acid sequence having at least 80% (such as at least 85%, at least 90%, at least 91%, at least 92%, at least 93%, at least 94%, at least 95%, at least 96%, at least 97%, at least 98%, at least 99% or 100%) identity to SEQ ID NO: 717. In some aspects, a polypeptide provided herein comprises or consists of an amino acid sequence having at least 80% (such as at least 85%, at least 90%, at least 91%, at least 92%, at least 93%, at least 94%, at least 95%, at least 96%, at least 97%, at least 98%, at least 99% or 100%) identity to SEQ ID NO: 718. In some aspects, a polypeptide provided herein comprises or consists of an amino acid sequence having at least 80% (such as at least 85%, at least 90%, at least 91%, at least 92%, at least 93%, at least 94%, at least 95%, at least 96%, at least 97%, at least 98%, at least 99% or 100%) identity to SEQ ID NO: 719. In some aspects, a polypeptide provided herein comprises or consists of an amino acid sequence having at least 80% (such as at least 85%, at least 90%, at least 91%, at least 92%, at least 93%, at least 94%, at least 95%, at least 96%, at least 97%, at least 98%, at least 99% or 100%) identity to SEQ ID NO: 720. In some aspects, a polypeptide provided herein comprises or consists of an amino acid sequence having at least 80% (such as at least 85%, at least 90%, at least 91%, at least 92%, at least 93%, at least 94%, at least 95%, at least 96%, at least 97%, at least 98%, at least 99% or 100%) identity to SEQ ID NO: 721. In some aspects, a polypeptide provided herein comprises or consists of an amino acid sequence having at least 80% (such as at least 85%, at least 90%, at least 91%, at least 92%, at least 93%, at least 94%, at least 95%, at least 96%, at least 97%, at least 98%, at least 99% or 100%) identity to SEQ ID NO: 722. In some aspects, a polypeptide provided herein comprises or consists of an amino acid sequence having at least 80% (such as at least 85%, at least 90%, at least 91%, at least 92%, at least 93%, at least 94%, at least 95%, at least 96%, at least 97%, at least 98%, at least 99% or 100%) identity to SEQ ID NO: 723. In some aspects, a polypeptide provided herein comprises or consists of an amino acid sequence having at least 80% (such as at least 85%, at least 90%, at least 91%, at least 92%, at least 93%, at least 94%, at least 95%, at least 96%, at least 97%, at least 98%, at least 99% or 100%) identity to SEQ ID NO: 724. In some aspects, a polypeptide provided herein comprises or consists of an amino acid sequence having at least 80% (such as at least 85%, at least 90%, at least 91%, at least 92%, at least 93%, at least 94%, at least 95%, at least 96%, at least 97%, at least 98%, at least 99% or 100%) identity to SEQ ID NO: 725. In some aspects, a polypeptide provided herein comprises or consists of an amino acid sequence having at least 80% (such as at least 85%, at least 90%, at least 91%, at least 92%, at least 93%, at least 94%, at least 95%, at least 96%, at least 97%, at least 98%, at least 99% or 100%) identity to SEQ ID NO: 726. In some aspects, a polypeptide provided herein comprises or consists of an amino acid sequence having at least 80% (such as at least 85%, at least 90%, at least 91%, at least 92%, at least 93%, at least 94%, at least 95%, at least 96%, at least 97%, at least 98%, at least 99% or 100%) identity to SEQ ID NO: 727. In some aspects, a polypeptide provided herein comprises or consists of an amino acid sequence having at least 80% (such as at least 85%, at least 90%, at least 91%, at least 92%, at least 93%, at least 94%, at least 95%, at least 96%, at least 97%, at least 98%, at least 99% or 100%) identity to SEQ ID NO: 728. In some aspects, a polypeptide provided herein comprises or consists of an amino acid sequence having at least 80% (such as at least 85%, at least 90%, at least 91%, at least 92%, at least 93%, at least 94%, at least 95%, at least 96%, at least 97%, at least 98%, at least 99% or 100%) identity to SEQ ID NO: 729. In some aspects, a polypeptide provided herein comprises or consists of an amino acid sequence having at least 80% (such as at least 85%, at least 90%, at least 91%, at least 92%, at least 93%, at least 94%, at least 95%, at least 96%, at least 97%, at least 98%, at least 99% or 100%) identity to SEQ ID NO: 730. In some aspects, a polypeptide provided herein comprises or consists of an amino acid sequence having at least 80% (such as at least 85%, at least 90%, at least 91%, at least 92%, at least 93%, at least 94%, at least 95%, at least 96%, at least 97%, at least 98%, at least 99% or 100%) identity to SEQ ID NO: 731. In some aspects, a polypeptide provided herein comprises or consists of an amino acid sequence having at least 80% (such as at least 85%, at least 90%, at least 91%, at least 92%, at least 93%, at least 94%, at least 95%, at least 96%, at least 97%, at least 98%, at least 99% or 100%) identity to SEQ ID NO: 732. In some aspects, a polypeptide provided herein comprises or consists of an amino acid sequence having at least 80% (such as at least 85%, at least 90%, at least 91%, at least 92%, at least 93%, at least 94%, at least 95%, at least 96%, at least 97%, at least 98%, at least 99% or 100%) identity to SEQ ID NO: 733. In some aspects, a polypeptide provided herein comprises or consists of an amino acid sequence having at least 80% (such as at least 85%, at least 90%, at least 91%, at least 92%, at least 93%, at least 94%, at least 95%, at least 96%, at least 97%, at least 98%, at least 99% or 100%) identity to SEQ ID NO: 734. In some aspects, a polypeptide provided herein comprises or consists of an amino acid sequence having at least 80% (such as at least 85%, at least 90%, at least 91%, at least 92%, at least 93%, at least 94%, at least 95%, at least 96%, at least 97%, at least 98%, at least 99% or 100%) identity to SEQ ID NO: 735. In some aspects, a polypeptide provided herein comprises or consists of an amino acid sequence having at least 80% (such as at least 85%, at least 90%, at least 91%, at least 92%, at least 93%, at least 94%, at least 95%, at least 96%, at least 97%, at least 98%, at least 99% or 100%) identity to SEQ ID NO: 736. In some aspects, a polypeptide provided herein comprises or consists of an amino acid sequence having at least 80% (such as at least 85%, at least 90%, at least 91%, at least 92%, at least 93%, at least 94%, at least 95%, at least 96%, at least 97%, at least 98%, at least 99% or 100%) identity to SEQ ID NO: 737. In some aspects, a polypeptide provided herein comprises or consists of an amino acid sequence having at least 80% (such as at least 85%, at least 90%, at least 91%, at least 92%, at least 93%, at least 94%, at least 95%, at least 96%, at least 97%, at least 98%, at least 99% or 100%) identity to SEQ ID NO: 738. In some aspects, a polypeptide provided herein comprises or consists of an amino acid sequence having at least 80% (such as at least 85%, at least 90%, at least 91%, at least 92%, at least 93%, at least 94%, at least 95%, at least 96%, at least 97%, at least 98%, at least 99% or 100%) identity to SEQ ID NO: 739. In some aspects, a polypeptide provided herein comprises or consists of an amino acid sequence having at least 80% (such as at least 85%, at least 90%, at least 91%, at least 92%, at least 93%, at least 94%, at least 95%, at least 96%, at least 97%, at least 98%, at least 99% or 100%) identity to SEQ ID NO: 740. In some aspects, a polypeptide provided herein comprises or consists of an amino acid sequence having at least 80% (such as at least 85%, at least 90%, at least 91%, at least 92%, at least 93%, at least 94%, at least 95%, at least 96%, at least 97%, at least 98%, at least 99% or 100%) identity to SEQ ID NO: 741. In some aspects, a polypeptide provided herein comprises or consists of an amino acid sequence having at least 80% (such as at least 85%, at least 90%, at least 91%, at least 92%, at least 93%, at least 94%, at least 95%, at least 96%, at least 97%, at least 98%, at least 99% or 100%) identity to SEQ ID NO: 742. In some aspects, a polypeptide provided herein comprises or consists of an amino acid sequence having at least 80% (such as at least 85%, at least 90%, at least 91%, at least 92%, at least 93%, at least 94%, at least 95%, at least 96%, at least 97%, at least 98%, at least 99% or 100%) identity to SEQ ID NO: 743. In some aspects, a polypeptide provided herein comprises or consists of an amino acid sequence having at least 80% (such as at least 85%, at least 90%, at least 91%, at least 92%, at least 93%, at least 94%, at least 95%, at least 96%, at least 97%, at least 98%, at least 99% or 100%) identity to SEQ ID NO: 744. In some aspects, a polypeptide provided herein comprises or consists of an amino acid sequence having at least 80% (such as at least 85%, at least 90%, at least 91%, at least 92%, at least 93%, at least 94%, at least 95%, at least 96%, at least 97%, at least 98%, at least 99% or 100%) identity to SEQ ID NO: 745. In some aspects, a polypeptide provided herein comprises or consists of an amino acid sequence having at least 80% (such as at least 85%, at least 90%, at least 91%, at least 92%, at least 93%, at least 94%, at least 95%, at least 96%, at least 97%, at least 98%, at least 99% or 100%) identity to SEQ ID NO: 746. In some aspects, a polypeptide provided herein comprises or consists of an amino acid sequence having at least 80% (such as at least 85%, at least 90%, at least 91%, at least 92%, at least 93%, at least 94%, at least 95%, at least 96%, at least 97%, at least 98%, at least 99% or 100%) identity to SEQ ID NO: 747. In some aspects, a polypeptide provided herein comprises or consists of an amino acid sequence having at least 80% (such as at least 85%, at least 90%, at least 91%, at least 92%, at least 93%, at least 94%, at least 95%, at least 96%, at least 97%, at least 98%, at least 99% or 100%) identity to SEQ ID NO: 748. In some aspects, a polypeptide provided herein comprises or consists of an amino acid sequence having at least 80% (such as at least 85%, at least 90%, at least 91%, at least 92%, at least 93%, at least 94%, at least 95%, at least 96%, at least 97%, at least 98%, at least 99% or 100%) identity to SEQ ID NO: 749. In some aspects, a polypeptide provided herein comprises or consists of an amino acid sequence having at least 80% (such as at least 85%, at least 90%, at least 91%, at least 92%, at least 93%, at least 94%, at least 95%, at least 96%, at least 97%, at least 98%, at least 99% or 100%) identity to SEQ ID NO: 750. In some aspects, a polypeptide provided herein comprises or consists of an amino acid sequence having at least 80% (such as at least 85%, at least 90%, at least 91%, at least 92%, at least 93%, at least 94%, at least 95%, at least 96%, at least 97%, at least 98%, at least 99% or 100%) identity to SEQ ID NO: 751. In some aspects, a polypeptide provided herein comprises or consists of an amino acid sequence having at least 80% (such as at least 85%, at least 90%, at least 91%, at least 92%, at least 93%, at least 94%, at least 95%, at least 96%, at least 97%, at least 98%, at least 99% or 100%) identity to SEQ ID NO: 752. In some aspects, a polypeptide provided herein comprises or consists of an amino acid sequence having at least 80% (such as at least 85%, at least 90%, at least 91%, at least 92%, at least 93%, at least 94%, at least 95%, at least 96%, at least 97%, at least 98%, at least 99% or 100%) identity to SEQ ID NO: 753. In some aspects, a polypeptide provided herein comprises or consists of an amino acid sequence having at least 80% (such as at least 85%, at least 90%, at least 91%, at least 92%, at least 93%, at least 94%, at least 95%, at least 96%, at least 97%, at least 98%, at least 99% or 100%) identity to SEQ ID NO: 754. In some aspects, a polypeptide provided herein comprises the amino acid sequence of one or more of SEQ ID NOs:46-113, 150-165, 190-258, 291, 295, 297, 299, 301, 303, 305, 307, 309, 311, 313, 315, 317, 319, 321, 323, 325, 327, 329, 331, 333, 335, 337, 339, 341, 343, 345, 347, 349, 351, 353, 355, 357, 359, 361, 363, 365, 367, 369, 371, 373, 375, 377, 379, 381, 383, 385, 387, 389, 391, 395, 397, 399, 401, 403, 405, 407, 409, 411, 413, 415, 417, 419, 421, 423, 425, 427, 429, 431, 433, 435, 437, 439, 441, 443, 445, 447, 449, 451, 453, 455, 457, 459, 461, 463, 465, 467, 469, 471, 473, 475, 477, 479, 481, 483, 485, 487, 489, 491, 493, 495, 497, 499, 501, 503, 505 and 711-754.

[0960] In some aspects, a polypeptide provided herein comprises an amino acid sequence encoded by one or more polynucleotide having at least 80%, at least 85%, at least 90%, at least 91%, at least 92%, at least 93%, at least 94%, at least 95%, at least 96%, at least 97%, at least 98%, at least 99% or 100% identity to one or more of SEQ ID NOs:114-149, 292, 296, 298, 300, 302, 304, 306, 308, 310, 312, 314, 316, 318, 320, 322, 324, 326, 328, 330, 332, 334, 336, 338, 340, 342, 344, 346, 348, 350, 352, 354, 356, 358, 360, 362, 364, 366, 368, 370, 372, 374, 376, 378, 380, 382, 384, 386, 388, 390, 392, 393, 394, 396, 398, 400, 402, 404, 406, 408, 410, 412, 414, 416, 418, 420, 422, 424, 426, 428, 430, 432, 434, 436, 438, 440, 442, 444, 446, 448, 450, 452, 454, 456, 458, 460, 462, 464, 466, 468, 470, 472, 474, 476, 478, 480, 482, 484, 486, 488, 490, 492, 494, 496, 498, 500, 502, 504, 506, 507, 671-710 and 755-777. In some aspects, a polypeptide provided herein comprises or consists of an amino acid sequence encoded by one or more polynucleotide having at least 80% identity to one or more of SEQ ID NOs:114-149, 292, 296, 298, 300, 302, 304, 306, 308, 310, 312, 314, 316, 318, 320, 322, 324, 326, 328, 330, 332, 334, 336, 338, 340, 342, 344, 346, 348, 350, 352, 354, 356, 358, 360, 362, 364, 366, 368, 370, 372, 374, 376, 378, 380, 382, 384, 386, 388, 390, 392, 393, 394, 396, 398, 400, 402, 404, 406, 408, 410, 412, 414, 416, 418, 420, 422, 424, 426, 428, 430, 432, 434, 436, 438, 440, 442, 444, 446, 448, 450, 452, 454, 456, 458, 460, 462, 464, 466, 468, 470, 472, 474, 476, 478, 480, 482, 484, 486, 488, 490, 492, 494, 496, 498, 500, 502, 504, 506, 507, 671-710 and 755-777. In some aspects, a polypeptide provided herein comprises or consists of an amino acid sequence encoded by one or more polynucleotide having at least 85% identity to one or more of SEQ ID NOs:114-149, 292, 296, 298, 300, 302, 304, 306, 308, 310, 312, 314, 316, 318, 320, 322, 324, 326, 328, 330, 332, 334, 336, 338, 340, 342, 344, 346, 348, 350, 352, 354, 356, 358, 360, 362, 364, 366, 368, 370, 372, 374, 376, 378, 380, 382, 384, 386, 388, 390, 392, 393, 394, 396, 398, 400, 402, 404, 406, 408, 410, 412, 414, 416, 418, 420, 422, 424, 426, 428, 430, 432, 434, 436, 438, 440, 442, 444, 446, 448, 450, 452, 454, 456, 458, 460, 462, 464, 466, 468, 470, 472, 474, 476, 478, 480, 482, 484, 486, 488, 490, 492, 494, 496, 498, 500, 502, 504, 506, 507, 671-710 and 755-777. In some aspects, a polypeptide provided herein comprises or consists of an amino acid sequence encoded by one or more polynucleotide having at least 90% identity to one or more of SEQ ID NOs:114-149, 292, 296, 298, 300, 302, 304, 306, 308, 310, 312, 314, 316, 318, 320, 322, 324, 326, 328, 330, 332, 334, 336, 338, 340, 342, 344, 346, 348, 350, 352, 354, 356, 358, 360, 362, 364, 366, 368, 370, 372, 374, 376, 378, 380, 382, 384, 386, 388, 390, 392, 393, 394, 396, 398, 400, 402, 404, 406, 408, 410, 412, 414, 416, 418, 420, 422, 424, 426, 428, 430, 432, 434, 436, 438, 440, 442, 444, 446, 448, 450, 452, 454, 456, 458, 460, 462, 464, 466, 468, 470, 472, 474, 476, 478, 480, 482, 484, 486, 488, 490, 492, 494, 496, 498, 500, 502, 504, 506, 507, 671-710 and 755-777. In some aspects, a polypeptide provided herein comprises or consists of an amino acid sequence encoded by one or more polynucleotide having at least 91% identity to one or more of SEQ ID NOs:114-149, 292, 296, 298, 300, 302, 304, 306, 308, 310, 312, 314, 316, 318, 320, 322, 324, 326, 328, 330, 332, 334, 336, 338, 340, 342, 344, 346, 348, 350, 352, 354, 356, 358, 360, 362, 364, 366, 368, 370, 372, 374, 376, 378, 380, 382, 384, 386, 388, 390, 392, 393, 394, 396, 398, 400, 402, 404, 406, 408, 410, 412, 414, 416, 418, 420, 422, 424, 426, 428, 430, 432, 434, 436, 438, 440, 442, 444, 446, 448, 450, 452, 454, 456, 458, 460, 462, 464, 466, 468, 470, 472, 474, 476, 478, 480, 482, 484, 486, 488, 490, 492, 494, 496, 498, 500, 502, 504, 506, 507, 671-710 and 755-777. In some aspects, a polypeptide provided herein comprises or consists of an amino acid sequence encoded by one or more polynucleotide having at least 92% identity to one or more of SEQ ID NOs:114-149, 292, 296, 298, 300, 302, 304, 306, 308, 310, 312, 314, 316, 318, 320, 322, 324, 326, 328, 330, 332, 334, 336, 338, 340, 342, 344, 346, 348, 350, 352, 354, 356, 358, 360, 362, 364, 366, 368, 370, 372, 374, 376, 378, 380, 382, 384, 386, 388, 390, 392, 393, 394, 396, 398, 400, 402, 404, 406, 408, 410, 412, 414, 416, 418, 420, 422, 424, 426, 428, 430, 432, 434, 436, 438, 440, 442, 444, 446, 448, 450, 452, 454, 456, 458, 460, 462, 464, 466, 468, 470, 472, 474, 476, 478, 480, 482, 484, 486, 488, 490, 492, 494, 496, 498, 500, 502, 504, 506, 507, 671-710 and 755-777. In some aspects, a polypeptide provided herein comprises or consists of an amino acid sequence encoded by one or more polynucleotide having at least 93% identity to one or more of SEQ ID NOs:114-149, 292, 296, 298, 300, 302, 304, 306, 308, 310, 312, 314, 316, 318, 320, 322, 324, 326, 328, 330, 332, 334, 336, 338, 340, 342, 344, 346, 348, 350, 352, 354, 356, 358, 360, 362, 364, 366, 368, 370, 372, 374, 376, 378, 380, 382, 384, 386, 388, 390, 392, 393, 394, 396, 398, 400, 402, 404, 406, 408, 410, 412, 414, 416, 418, 420, 422, 424, 426, 428, 430, 432, 434, 436, 438, 440, 442, 444, 446, 448, 450, 452, 454, 456, 458, 460, 462, 464, 466, 468, 470, 472, 474, 476, 478, 480, 482, 484, 486, 488, 490, 492, 494, 496, 498, 500, 502, 504, 506, 507, 671-710 and 755-777. In some aspects, a polypeptide provided herein comprises or consists of an amino acid sequence encoded by one or more polynucleotide having at least 94% identity to one or more of SEQ ID NOs:114-149, 292, 296, 298, 300, 302, 304, 306, 308, 310, 312, 314, 316, 318, 320, 322, 324, 326, 328, 330, 332, 334, 336, 338, 340, 342, 344, 346, 348, 350, 352, 354, 356, 358, 360, 362, 364, 366, 368, 370, 372, 374, 376, 378, 380, 382, 384, 386, 388, 390, 392, 393, 394, 396, 398, 400, 402, 404, 406, 408, 410, 412, 414, 416, 418, 420, 422, 424, 426, 428, 430, 432, 434, 436, 438, 440, 442, 444, 446, 448, 450, 452, 454, 456, 458, 460, 462, 464, 466, 468, 470, 472, 474, 476, 478, 480, 482, 484, 486, 488, 490, 492, 494, 496, 498, 500, 502, 504, 506, 507, 671-710 and 755-777. In some aspects, a polypeptide provided herein comprises or consists of an amino acid sequence encoded by one or more polynucleotide having at least 95% identity to one or more of SEQ ID NOs:114-149, 292, 296, 298, 300, 302, 304, 306, 308, 310, 312, 314, 316, 318, 320, 322, 324, 326, 328, 330, 332, 334, 336, 338, 340, 342, 344, 346, 348, 350, 352, 354, 356, 358, 360, 362, 364, 366, 368, 370, 372, 374, 376, 378, 380, 382, 384, 386, 388, 390, 392, 393, 394, 396, 398, 400, 402, 404, 406, 408, 410, 412, 414, 416, 418, 420, 422, 424, 426, 428, 430, 432, 434, 436, 438, 440, 442, 444, 446, 448, 450, 452, 454, 456, 458, 460, 462, 464, 466, 468, 470, 472, 474, 476, 478, 480, 482, 484, 486, 488, 490, 492, 494, 496, 498, 500, 502, 504, 506, 507, 671-710 and 755-777. In some aspects, a polypeptide provided herein comprises or consists of an amino acid sequence encoded by one or more polynucleotide having at least 96% identity to one or more of SEQ ID NOs:114-149, 292, 296, 298, 300, 302, 304, 306, 308, 310, 312, 314, 316, 318, 320, 322, 324, 326, 328, 330, 332, 334, 336, 338, 340, 342, 344, 346, 348, 350, 352, 354, 356, 358, 360, 362, 364, 366, 368, 370, 372, 374, 376, 378, 380, 382, 384, 386, 388, 390, 392, 393, 394, 396, 398, 400, 402, 404, 406, 408, 410, 412, 414, 416, 418, 420, 422, 424, 426, 428, 430, 432, 434, 436, 438, 440, 442, 444, 446, 448, 450, 452, 454, 456, 458, 460, 462, 464, 466, 468, 470, 472, 474, 476, 478, 480, 482, 484, 486, 488, 490, 492, 494, 496, 498, 500, 502, 504, 506, 507, 671-710 and 755-777. In some aspects, a polypeptide provided herein comprises or consists of an amino acid sequence encoded by one or more polynucleotide having at least 97% identity to one or more of SEQ ID NOs:114-149, 292, 296, 298, 300, 302, 304, 306, 308, 310, 312, 314, 316, 318, 320, 322, 324, 326, 328, 330, 332, 334, 336, 338, 340, 342, 344, 346, 348, 350, 352, 354, 356, 358, 360, 362, 364, 366, 368, 370, 372, 374, 376, 378, 380, 382, 384, 386, 388, 390, 392, 393, 394, 396, 398, 400, 402, 404, 406, 408, 410, 412, 414, 416, 418, 420, 422, 424, 426, 428, 430, 432, 434, 436, 438, 440, 442, 444, 446, 448, 450, 452, 454, 456, 458, 460, 462, 464, 466, 468, 470, 472, 474, 476, 478, 480, 482, 484, 486, 488, 490, 492, 494, 496, 498, 500, 502, 504, 506, 507, 671-710 and 755-777. In some aspects, a polypeptide provided herein comprises or consists of an amino acid sequence encoded by one or more polynucleotide having at least 98% identity to one or more of SEQ ID NOs:114-149, 292, 296, 298, 300, 302, 304, 306, 308, 310, 312, 314, 316, 318, 320, 322, 324, 326, 328, 330, 332, 334, 336, 338, 340, 342, 344, 346, 348, 350, 352, 354, 356, 358, 360, 362, 364, 366, 368, 370, 372, 374, 376, 378, 380, 382, 384, 386, 388, 390, 392, 393, 394, 396, 398, 400, 402, 404, 406, 408, 410, 412, 414, 416, 418, 420, 422, 424, 426, 428, 430, 432, 434, 436, 438, 440, 442, 444, 446, 448, 450, 452, 454, 456, 458, 460, 462, 464, 466, 468, 470, 472, 474, 476, 478, 480, 482, 484, 486, 488, 490, 492, 494, 496, 498, 500, 502, 504, 506, 507, 671-710 and 755-777. In some aspects, a polypeptide provided herein comprises or consists of an amino acid sequence encoded by one or more polynucleotide having at least 99% identity to one or more of SEQ ID NOs:114-149, 292, 296, 298, 300, 302, 304, 306, 308, 310, 312, 314, 316, 318, 320, 322, 324, 326, 328, 330, 332, 334, 336, 338, 340, 342, 344, 346, 348, 350, 352, 354, 356, 358, 360, 362, 364, 366, 368, 370, 372, 374, 376, 378, 380, 382, 384, 386, 388, 390, 392, 393, 394, 396, 398, 400, 402, 404, 406, 408, 410, 412, 414, 416, 418, 420, 422, 424, 426, 428, 430, 432, 434, 436, 438, 440, 442, 444, 446, 448, 450, 452, 454, 456, 458, 460, 462, 464, 466, 468, 470, 472, 474, 476, 478, 480, 482, 484, 486, 488, 490, 492, 494, 496, 498, 500, 502, 504, 506, 507, 671-710 and 755-777. In some aspects, a polypeptide provided herein comprises or consists of an amino acid sequence encoded by one or more polynucleotide of SEQ ID NOs:114-149, 292, 296, 298, 300, 302, 304, 306, 308, 310, 312, 314, 316, 318, 320, 322, 324, 326, 328, 330, 332, 334, 336, 338, 340, 342, 344, 346, 348, 350, 352, 354, 356, 358, 360, 362, 364, 366, 368, 370, 372, 374, 376, 378, 380, 382, 384, 386, 388, 390, 392, 393, 394, 396, 398, 400, 402, 404, 406, 408, 410, 412, 414, 416, 418, 420, 422, 424, 426, 428, 430, 432, 434, 436, 438, 440, 442, 444, 446, 448, 450, 452, 454, 456, 458, 460, 462, 464, 466, 468, 470, 472, 474, 476, 478, 480, 482, 484, 486, 488, 490, 492, 494, 496, 498, 500, 502, 504, 506, 507, 671-710, and 755-777.

[0961] In some aspects, a polynucleotide provided herein comprises a sequence having at least 80%, at least 85%, at least 90%, at least 91%, at least 92%, at least 93%, at least 94%, at least 95%, at least 96%, at least 97%, at least 98%, at least 99% or 100% identity to one or more of SEQ ID NOs:114-149, 292, 296, 298, 300, 302, 304, 306, 308, 310, 312, 314, 316, 318, 320, 322, 324, 326, 328, 330, 332, 334, 336, 338, 340, 342, 344, 346, 348, 350, 352, 354, 356, 358, 360, 362, 364, 366, 368, 370, 372, 374, 376, 378, 380, 382, 384, 386, 388, 390, 392, 393, 394, 396, 398, 400, 402, 404, 406, 408, 410, 412, 414, 416, 418, 420, 422, 424, 426, 428, 430, 432, 434, 436, 438, 440, 442, 444, 446, 448, 450, 452, 454, 456, 458, 460, 462, 464, 466, 468, 470, 472, 474, 476, 478, 480, 482, 484, 486, 488, 490, 492, 494, 496, 498, 500, 502, 504, 506, 507, 671-710 and 755-777. In some aspects, a polynucleotide provided herein comprises or consists of a polynucleotide sequence having at least 80% identity to one or more of SEQ ID NOs:114-149, 292, 296, 298, 300, 302, 304, 306, 308, 310, 312, 314, 316, 318, 320, 322, 324, 326, 328, 330, 332, 334, 336, 338, 340, 342, 344, 346, 348, 350, 352, 354, 356, 358, 360, 362, 364, 366, 368, 370, 372, 374, 376, 378, 380, 382, 384, 386, 388, 390, 392, 393, 394, 396, 398, 400, 402, 404, 406, 408, 410, 412, 414, 416, 418, 420, 422, 424, 426, 428, 430, 432, 434, 436, 438, 440, 442, 444, 446, 448, 450, 452, 454, 456, 458, 460, 462, 464, 466, 468, 470, 472, 474, 476, 478, 480, 482, 484, 486, 488, 490, 492, 494, 496, 498, 500, 502, 504, 506, 507, 671-710 and 755-777. In some aspects, a polynucleotide provided herein comprises or consists of a polynucleotide sequence having at least 85% identity to one or more of SEQ ID NOs:114-149, 292, 296, 298, 300, 302, 304, 306, 308, 310, 312, 314, 316, 318, 320, 322, 324, 326, 328, 330, 332, 334, 336, 338, 340, 342, 344, 346, 348, 350, 352, 354, 356, 358, 360, 362, 364, 366, 368, 370, 372, 374, 376, 378, 380, 382, 384, 386, 388, 390, 392, 393, 394, 396, 398, 400, 402, 404, 406, 408, 410, 412, 414, 416, 418, 420, 422, 424, 426, 428, 430, 432, 434, 436, 438, 440, 442, 444, 446, 448, 450, 452, 454, 456, 458, 460, 462, 464, 466, 468, 470, 472, 474, 476, 478, 480, 482, 484, 486, 488, 490, 492, 494, 496, 498, 500, 502, 504, 506, 507, 671-710 and 755-777. In some aspects, a polynucleotide provided herein comprises or consists of a polynucleotide sequence having at least 90% identity to one or more of SEQ ID NOs:114-149, 292, 296, 298, 300, 302, 304, 306, 308, 310, 312, 314, 316, 318, 320, 322, 324, 326, 328, 330, 332, 334, 336, 338, 340, 342, 344, 346, 348, 350, 352, 354, 356, 358, 360, 362, 364, 366, 368, 370, 372, 374, 376, 378, 380, 382, 384, 386, 388, 390, 392, 393, 394, 396, 398, 400, 402, 404, 406, 408, 410, 412, 414, 416, 418, 420, 422, 424, 426, 428, 430, 432, 434, 436, 438, 440, 442, 444, 446, 448, 450, 452, 454, 456, 458, 460, 462, 464, 466, 468, 470, 472, 474, 476, 478, 480, 482, 484, 486, 488, 490, 492, 494, 496, 498, 500, 502, 504, 506, 507, 671-710 and 755-777. In some aspects, a polynucleotide provided herein comprises or consists of a polynucleotide sequence having at least 91% identity to one or more of SEQ ID NOs:114-149, 292, 296, 298, 300, 302, 304, 306, 308, 310, 312, 314, 316, 318, 320, 322, 324, 326, 328, 330, 332, 334, 336, 338, 340, 342, 344, 346, 348, 350, 352, 354, 356, 358, 360, 362, 364, 366, 368, 370, 372, 374, 376, 378, 380, 382, 384, 386, 388, 390, 392, 393, 394, 396, 398, 400, 402, 404, 406, 408, 410, 412, 414, 416, 418, 420, 422, 424, 426, 428, 430, 432, 434, 436, 438, 440, 442, 444, 446, 448, 450, 452, 454, 456, 458, 460, 462, 464, 466, 468, 470, 472, 474, 476, 478, 480, 482, 484, 486, 488, 490, 492, 494, 496, 498, 500, 502, 504, 506, 507, 671-710 and 755-777. In some aspects, a polynucleotide provided herein comprises or consists of a polynucleotide sequence having at least 92% identity to one or more of SEQ ID NOs:114-149, 292, 296, 298, 300, 302, 304, 306, 308, 310, 312, 314, 316, 318, 320, 322, 324, 326, 328, 330, 332, 334, 336, 338, 340, 342, 344, 346, 348, 350, 352, 354, 356, 358, 360, 362, 364, 366, 368, 370, 372, 374, 376, 378, 380, 382, 384, 386, 388, 390, 392, 393, 394, 396, 398, 400, 402, 404, 406, 408, 410, 412, 414, 416, 418, 420, 422, 424, 426, 428, 430, 432, 434, 436, 438, 440, 442, 444, 446, 448, 450, 452, 454, 456, 458, 460, 462, 464, 466, 468, 470, 472, 474, 476, 478, 480, 482, 484, 486, 488, 490, 492, 494, 496, 498, 500, 502, 504, 506, 507, 671-710 and 755-777. In some aspects, a polynucleotide provided herein comprises or consists of a polynucleotide sequence having at least 93% identity to one or more of SEQ ID NOs:114-149, 292, 296, 298, 300, 302, 304, 306, 308, 310, 312, 314, 316, 318, 320, 322, 324, 326, 328, 330, 332, 334, 336, 338, 340, 342, 344, 346, 348, 350, 352, 354, 356, 358, 360, 362, 364, 366, 368, 370, 372, 374, 376, 378, 380, 382, 384, 386, 388, 390, 392, 393, 394, 396, 398, 400, 402, 404, 406, 408, 410, 412, 414, 416, 418, 420, 422, 424, 426, 428, 430, 432, 434, 436, 438, 440, 442, 444, 446, 448, 450, 452, 454, 456, 458, 460, 462, 464, 466, 468, 470, 472, 474, 476, 478, 480, 482, 484, 486, 488, 490, 492, 494, 496, 498, 500, 502, 504, 506, 507, 671-710 and 755-777. In some aspects, a polynucleotide provided herein comprises or consists of a polynucleotide sequence having at least 94% identity to one or more of SEQ ID NOs:114-149, 292, 296, 298, 300, 302, 304, 306, 308, 310, 312, 314, 316, 318, 320, 322, 324, 326, 328, 330, 332, 334, 336, 338, 340, 342, 344, 346, 348, 350, 352, 354, 356, 358, 360, 362, 364, 366, 368, 370, 372, 374, 376, 378, 380, 382, 384, 386, 388, 390, 392, 393, 394, 396, 398, 400, 402, 404, 406, 408, 410, 412, 414, 416, 418, 420, 422, 424, 426, 428, 430, 432, 434, 436, 438, 440, 442, 444, 446, 448, 450, 452, 454, 456, 458, 460, 462, 464, 466, 468, 470, 472, 474, 476, 478, 480, 482, 484, 486, 488, 490, 492, 494, 496, 498, 500, 502, 504, 506, 507, 671-710 and 755-777. In some aspects, a polynucleotide provided herein comprises or consists of a polynucleotide sequence having at least 95% identity to one or more of SEQ ID NOs:114-149, 292, 296, 298, 300, 302, 304, 306, 308, 310, 312, 314, 316, 318, 320, 322, 324, 326, 328, 330, 332, 334, 336, 338, 340, 342, 344, 346, 348, 350, 352, 354, 356, 358, 360, 362, 364, 366, 368, 370, 372, 374, 376, 378, 380, 382, 384, 386, 388, 390, 392, 393, 394, 396, 398, 400, 402, 404, 406, 408, 410, 412, 414, 416, 418, 420, 422, 424, 426, 428, 430, 432, 434, 436, 438, 440, 442, 444, 446, 448, 450, 452, 454, 456, 458, 460, 462, 464, 466, 468, 470, 472, 474, 476, 478, 480, 482, 484, 486, 488, 490, 492, 494, 496, 498, 500, 502, 504, 506, 507, 671-710 and 755-777. In some aspects, a polynucleotide provided herein comprises or consists of a polynucleotide sequence having at least 96% identity to one or more of SEQ ID NOs:114-149, 292, 296, 298, 300, 302, 304, 306, 308, 310, 312, 314, 316, 318, 320, 322, 324, 326, 328, 330, 332, 334, 336, 338, 340, 342, 344, 346, 348, 350, 352, 354, 356, 358, 360, 362, 364, 366, 368, 370, 372, 374, 376, 378, 380, 382, 384, 386, 388, 390, 392, 393, 394, 396, 398, 400, 402, 404, 406, 408, 410, 412, 414, 416, 418, 420, 422, 424, 426, 428, 430, 432, 434, 436, 438, 440, 442, 444, 446, 448, 450, 452, 454, 456, 458, 460, 462, 464, 466, 468, 470, 472, 474, 476, 478, 480, 482, 484, 486, 488, 490, 492, 494, 496, 498, 500, 502, 504, 506, 507, 671-710 and 755-777. In some aspects, a polynucleotide provided herein comprises or consists of a polynucleotide sequence having at least 97% identity to one or more of SEQ ID NOs:114-149, 292, 296, 298, 300, 302, 304, 306, 308, 310, 312, 314, 316, 318, 320, 322, 324, 326, 328, 330, 332, 334, 336, 338, 340, 342, 344, 346, 348, 350, 352, 354, 356, 358, 360, 362, 364, 366, 368, 370, 372, 374, 376, 378, 380, 382, 384, 386, 388, 390, 392, 393, 394, 396, 398, 400, 402, 404, 406, 408, 410, 412, 414, 416, 418, 420, 422, 424, 426, 428, 430, 432, 434, 436, 438, 440, 442, 444, 446, 448, 450, 452, 454, 456, 458, 460, 462, 464, 466, 468, 470, 472, 474, 476, 478, 480, 482, 484, 486, 488, 490, 492, 494, 496, 498, 500, 502, 504, 506, 507, 671-710 and 755-777. In some aspects, a polynucleotide provided herein comprises or consists of a polynucleotide sequence having at least 98% identity to one or more of SEQ ID NOs:114-149, 292, 296, 298, 300, 302, 304, 306, 308, 310, 312, 314, 316, 318, 320, 322, 324, 326, 328, 330, 332, 334, 336, 338, 340, 342, 344, 346, 348, 350, 352, 354, 356, 358, 360, 362, 364, 366, 368, 370, 372, 374, 376, 378, 380, 382, 384, 386, 388, 390, 392, 393, 394, 396, 398, 400, 402, 404, 406, 408, 410, 412, 414, 416, 418, 420, 422, 424, 426, 428, 430, 432, 434, 436, 438, 440, 442, 444, 446, 448, 450, 452, 454, 456, 458, 460, 462, 464, 466, 468, 470, 472, 474, 476, 478, 480, 482, 484, 486, 488, 490, 492, 494, 496, 498, 500, 502, 504, 506, 507, 671-710 and 755-777. In some aspects, a polynucleotide provided herein comprises or consists of a polynucleotide sequence having at least 99% identity to one or more of SEQ ID NOs:114-149, 292, 296, 298, 300, 302, 304, 306, 308, 310, 312, 314, 316, 318, 320, 322, 324, 326, 328, 330, 332, 334, 336, 338, 340, 342, 344, 346, 348, 350, 352, 354, 356, 358, 360, 362, 364, 366, 368, 370, 372, 374, 376, 378, 380, 382, 384, 386, 388, 390, 392, 393, 394, 396, 398, 400, 402, 404, 406, 408, 410, 412, 414, 416, 418, 420, 422, 424, 426, 428, 430, 432, 434, 436, 438, 440, 442, 444, 446, 448, 450, 452, 454, 456, 458, 460, 462, 464, 466, 468, 470, 472, 474, 476, 478, 480, 482, 484, 486, 488, 490, 492, 494, 496, 498, 500, 502, 504, 506, 507, 671-710 and 755-777. In some aspects, a polynucleotide provided herein comprises or consists of the sequence of one or more of SEQ ID NOs:114-149, 292, 296, 298, 300, 302, 304, 306, 308, 310, 312, 314, 316, 318, 320, 322, 324, 326, 328, 330, 332, 334, 336, 338, 340, 342, 344, 346, 348, 350, 352, 354, 356, 358, 360, 362, 364, 366, 368, 370, 372, 374, 376, 378, 380, 382, 384, 386, 388, 390, 392, 393, 394, 396, 398, 400, 402, 404, 406, 408, 410, 412, 414, 416, 418, 420, 422, 424, 426, 428, 430, 432, 434, 436, 438, 440, 442, 444, 446, 448, 450, 452, 454, 456, 458, 460, 462, 464, 466, 468, 470, 472, 474, 476, 478, 480, 482, 484, 486, 488, 490, 492, 494, 496, 498, 500, 502, 504, 506, 507, 671-710 and 755-777.

[0962] In some aspects, a polynucleotide provided herein encodes a polypeptide having at least 80%, at least 85%, at least 90%, at least 91%, at least 92%, at least 93%, at least 94%, at least 95%, at least 96%, at least 97%, at least 98%, at least 99% or 100% identity to one or more of SEQ ID NOs:46-113, 150-165, 190-258, 291, 295, 297, 299, 301, 303, 305, 307, 309, 311, 313, 315, 317, 319, 321, 323, 325, 327, 329, 331, 333, 335, 337, 339, 341, 343, 345, 347, 349, 351, 353, 355, 357, 359, 361, 363, 365, 367, 369, 371, 373, 375, 377, 379, 381, 383, 385, 387, 389, 391, 395, 397, 399, 401, 403, 405, 407, 409, 411, 413, 415, 417, 419, 421, 423, 425, 427, 429, 431, 433, 435, 437, 439, 441, 443, 445, 447, 449, 451, 453, 455, 457, 459, 461, 463, 465, 467, 469, 471, 473, 475, 477, 479, 481, 483, 485, 487, 489, 491, 493, 495, 497, 499, 501, 503, 505 and 711-754. In some aspects, a polynucleotide provided herein encodes a polypeptide having at least 80%, identity to one or more of SEQ ID NOs:46-113, 150-165, 190-258, 291, 295, 297, 299, 301, 303, 305, 307, 309, 311, 313, 315, 317, 319, 321, 323, 325, 327, 329, 331, 333, 335, 337, 339, 341, 343, 345, 347, 349, 351, 353, 355, 357, 359, 361, 363, 365, 367, 369, 371, 373, 375, 377, 379, 381, 383, 385, 387, 389, 391, 395, 397, 399, 401, 403, 405, 407, 409, 411, 413, 415, 417, 419, 421, 423, 425, 427, 429, 431, 433, 435, 437, 439, 441, 443, 445, 447, 449, 451, 453, 455, 457, 459, 461, 463, 465, 467, 469, 471, 473, 475, 477, 479, 481, 483, 485, 487, 489, 491, 493, 495, 497, 499, 501, 503, 505 and 711-754. In some aspects, a polynucleotide provided herein encodes a polypeptide having at least 85%, identity to one or more of SEQ ID NOs:46-113, 150-165, 190-258, 291, 295, 297, 299, 301, 303, 305, 307, 309, 311, 313, 315, 317, 319, 321, 323, 325, 327, 329, 331, 333, 335, 337, 339, 341, 343, 345, 347, 349, 351, 353, 355, 357, 359, 361, 363, 365, 367, 369, 371, 373, 375, 377, 379, 381, 383, 385, 387, 389, 391, 395, 397, 399, 401, 403, 405, 407, 409, 411, 413, 415, 417, 419, 421, 423, 425, 427, 429, 431, 433, 435, 437, 439, 441, 443, 445, 447, 449, 451, 453, 455, 457, 459, 461, 463, 465, 467, 469, 471, 473, 475, 477, 479, 481, 483, 485, 487, 489, 491, 493, 495, 497, 499, 501, 503, 505 and 711-754. In some aspects, a polynucleotide provided herein encodes a polypeptide having at least 90%, identity to one or more of SEQ ID NOs:46-113, 150-165, 190-258, 291, 295, 297, 299, 301, 303, 305, 307, 309, 311, 313, 315, 317, 319, 321, 323, 325, 327, 329, 331, 333, 335, 337, 339, 341, 343, 345, 347, 349, 351, 353, 355, 357, 359, 361, 363, 365, 367, 369, 371, 373, 375, 377, 379, 381, 383, 385, 387, 389, 391, 395, 397, 399, 401, 403, 405, 407, 409, 411, 413, 415, 417, 419, 421, 423, 425, 427, 429, 431, 433, 435, 437, 439, 441, 443, 445, 447, 449, 451, 453, 455, 457, 459, 461, 463, 465, 467, 469, 471, 473, 475, 477, 479, 481, 483, 485, 487, 489, 491, 493, 495, 497, 499, 501, 503, 505 and 711-754. In some aspects, a polynucleotide provided herein encodes a polypeptide having at least 91%, identity to one or more of SEQ ID NOs:46-113, 150-165, 190-258, 291, 295, 297, 299, 301, 303, 305, 307, 309, 311, 313, 315, 317, 319, 321, 323, 325, 327, 329, 331, 333, 335, 337, 339, 341, 343, 345, 347, 349, 351, 353, 355, 357, 359, 361, 363, 365, 367, 369, 371, 373, 375, 377, 379, 381, 383, 385, 387, 389, 391, 395, 397, 399, 401, 403, 405, 407, 409, 411, 413, 415, 417, 419, 421, 423, 425, 427, 429, 431, 433, 435, 437, 439, 441, 443, 445, 447, 449, 451, 453, 455, 457, 459, 461, 463, 465, 467, 469, 471, 473, 475, 477, 479, 481, 483, 485, 487, 489, 491, 493, 495, 497, 499, 501, 503, 505 and 711-754. In some aspects, a polynucleotide provided herein encodes a polypeptide having at least 92%, identity to one or more of SEQ ID NOs:46-113, 150-165, 190-258, 291, 295, 297, 299, 301, 303, 305, 307, 309, 311, 313, 315, 317, 319, 321, 323, 325, 327, 329, 331, 333, 335, 337, 339, 341, 343, 345, 347, 349, 351, 353, 355, 357, 359, 361, 363, 365, 367, 369, 371, 373, 375, 377, 379, 381, 383, 385, 387, 389, 391, 395, 397, 399, 401, 403, 405, 407, 409, 411, 413, 415, 417, 419, 421, 423, 425, 427, 429, 431, 433, 435, 437, 439, 441, 443, 445, 447, 449, 451, 453, 455, 457, 459, 461, 463, 465, 467, 469, 471, 473, 475, 477, 479, 481, 483, 485, 487, 489, 491, 493, 495, 497, 499, 501, 503, 505 and 711-754. In some aspects, a polynucleotide provided herein encodes a polypeptide having at least 93%, identity to one or more of SEQ ID NOs:46-113, 150-165, 190-258, 291, 295, 297, 299, 301, 303, 305, 307, 309, 311, 313, 315, 317, 319, 321, 323, 325, 327, 329, 331, 333, 335, 337, 339, 341, 343, 345, 347, 349, 351, 353, 355, 357, 359, 361, 363, 365, 367, 369, 371, 373, 375, 377, 379, 381, 383, 385, 387, 389, 391, 395, 397, 399, 401, 403, 405, 407, 409, 411, 413, 415, 417, 419, 421, 423, 425, 427, 429, 431, 433, 435, 437, 439, 441, 443, 445, 447, 449, 451, 453, 455, 457, 459, 461, 463, 465, 467, 469, 471, 473, 475, 477, 479, 481, 483, 485, 487, 489, 491, 493, 495, 497, 499, 501, 503, 505 and 711-754. In some aspects, a polynucleotide provided herein encodes a polypeptide having at least 94%, identity to one or more of SEQ ID NOs:46-113, 150-165, 190-258, 291, 295, 297, 299, 301, 303, 305, 307, 309, 311, 313, 315, 317, 319, 321, 323, 325, 327, 329, 331, 333, 335, 337, 339, 341, 343, 345, 347, 349, 351, 353, 355, 357, 359, 361, 363, 365, 367, 369, 371, 373, 375, 377, 379, 381, 383, 385, 387, 389, 391, 395, 397, 399, 401, 403, 405, 407, 409, 411, 413, 415, 417, 419, 421, 423, 425, 427, 429, 431, 433, 435, 437, 439, 441, 443, 445, 447, 449, 451, 453, 455, 457, 459, 461, 463, 465, 467, 469, 471, 473, 475, 477, 479, 481, 483, 485, 487, 489, 491, 493, 495, 497, 499, 501, 503, 505 and 711-754. In some aspects, a polynucleotide provided herein encodes a polypeptide having at least 95%, identity to one or more of SEQ ID NOs:46-113, 150-165, 190-258, 291, 295, 297, 299, 301, 303, 305, 307, 309, 311, 313, 315, 317, 319, 321, 323, 325, 327, 329, 331, 333, 335, 337, 339, 341, 343, 345, 347, 349, 351, 353, 355, 357, 359, 361, 363, 365, 367, 369, 371, 373, 375, 377, 379, 381, 383, 385, 387, 389, 391, 395, 397, 399, 401, 403, 405, 407, 409, 411, 413, 415, 417, 419, 421, 423, 425, 427, 429, 431, 433, 435, 437, 439, 441, 443, 445, 447, 449, 451, 453, 455, 457, 459, 461, 463, 465, 467, 469, 471, 473, 475, 477, 479, 481, 483, 485, 487, 489, 491, 493, 495, 497, 499, 501, 503, 505 and 711-754. In some aspects, a polynucleotide provided herein encodes a polypeptide having at least 96%, identity to one or more of SEQ ID NOs:46-113, 150-165, 190-258, 291, 295, 297, 299, 301, 303, 305, 307, 309, 311, 313, 315, 317, 319, 321, 323, 325, 327, 329, 331, 333, 335, 337, 339, 341, 343, 345, 347, 349, 351, 353, 355, 357, 359, 361, 363, 365, 367, 369, 371, 373, 375, 377, 379, 381, 383, 385, 387, 389, 391, 395, 397, 399, 401, 403, 405, 407, 409, 411, 413, 415, 417, 419, 421, 423, 425, 427, 429, 431, 433, 435, 437, 439, 441, 443, 445, 447, 449, 451, 453, 455, 457, 459, 461, 463, 465, 467, 469, 471, 473, 475, 477, 479, 481, 483, 485, 487, 489, 491, 493, 495, 497, 499, 501, 503, 505 and 711-754. In some aspects, a polynucleotide provided herein encodes a polypeptide having at least 97%, identity to one or more of SEQ ID NOs:46-113, 150-165, 190-258, 291, 295, 297, 299, 301, 303, 305, 307, 309, 311, 313, 315, 317, 319, 321, 323, 325, 327, 329, 331, 333, 335, 337, 339, 341, 343, 345, 347, 349, 351, 353, 355, 357, 359, 361, 363, 365, 367, 369, 371, 373, 375, 377, 379, 381, 383, 385, 387, 389, 391, 395, 397, 399, 401, 403, 405, 407, 409, 411, 413, 415, 417, 419, 421, 423, 425, 427, 429, 431, 433, 435, 437, 439, 441, 443, 445, 447, 449, 451, 453, 455, 457, 459, 461, 463, 465, 467, 469, 471, 473, 475, 477, 479, 481, 483, 485, 487, 489, 491, 493, 495, 497, 499, 501, 503, 505 and 711-754. In some aspects, a polynucleotide provided herein encodes a polypeptide having at least 98%, identity to one or more of SEQ ID NOs:46-113, 150-165, 190-258, 291, 295, 297, 299, 301, 303, 305, 307, 309, 311, 313, 315, 317, 319, 321, 323, 325, 327, 329, 331, 333, 335, 337, 339, 341, 343, 345, 347, 349, 351, 353, 355, 357, 359, 361, 363, 365, 367, 369, 371, 373, 375, 377, 379, 381, 383, 385, 387, 389, 391, 395, 397, 399, 401, 403, 405, 407, 409, 411, 413, 415, 417, 419, 421, 423, 425, 427, 429, 431, 433, 435, 437, 439, 441, 443, 445, 447, 449, 451, 453, 455, 457, 459, 461, 463, 465, 467, 469, 471, 473, 475, 477, 479, 481, 483, 485, 487, 489, 491, 493, 495, 497, 499, 501, 503, 505 and 711-754. In some aspects, a polynucleotide provided herein encodes a polypeptide having at least 99%, identity to one or more of SEQ ID NOs:46-113, 150-165, 190-258, 291, 295, 297, 299, 301, 303, 305, 307, 309, 311, 313, 315, 317, 319, 321, 323, 325, 327, 329, 331, 333, 335, 337, 339, 341, 343, 345, 347, 349, 351, 353, 355, 357, 359, 361, 363, 365, 367, 369, 371, 373, 375, 377, 379, 381, 383, 385, 387, 389, 391, 395, 397, 399, 401, 403, 405, 407, 409, 411, 413, 415, 417, 419, 421, 423, 425, 427, 429, 431, 433, 435, 437, 439, 441, 443, 445, 447, 449, 451, 453, 455, 457, 459, 461, 463, 465, 467, 469, 471, 473, 475, 477, 479, 481, 483, 485, 487, 489, 491, 493, 495, 497, 499, 501, 503, 505 and 711-754. In some aspects, a polynucleotide provided herein encodes the polypeptide of one or more of SEQ ID NOs:46-113, 150-165, 190-258, 291, 295, 297, 299, 301, 303, 305, 307, 309, 311, 313, 315, 317, 319, 321, 323, 325, 327, 329, 331, 333, 335, 337, 339, 341, 343, 345, 347, 349, 351, 353, 355, 357, 359, 361, 363, 365, 367, 369, 371, 373, 375, 377, 379, 381, 383, 385, 387, 389, 391, 395, 397, 399, 401, 403, 405, 407, 409, 411, 413, 415, 417, 419, 421, 423, 425, 427, 429, 431, 433, 435, 437, 439, 441, 443, 445, 447, 449, 451, 453, 455, 457, 459, 461, 463, 465, 467, 469, 471, 473, 475, 477, 479, 481, 483, 485, 487, 489, 491, 493, 495, 497, 499, 501, 503, 505 and 711-754.

[0963] In some aspects, provided herein is a vector comprising a polynucleotide provided herein.

[0964] In some aspects, provided herein is a host cell comprising a polynucleotide or vector provided herein. As used herein, the term “host cell” can be any type of cell, e.g., a primary cell, a cell in culture, or a cell from a cell line. In some aspects, the term “host cell” refers to a cell containing a foreign gene [e.g., a cell subjected to gene delivery or transfected with a polynucleotide (e.g., DNA or mRNA) encoding the gene] transfected with a polynucleotide and the progeny or potential progeny of such a cell. Progeny of such a cell may not be identical to the parent cell transfected with the nucleic acid molecule, e.g., due to mutations or environmental influences that may occur in succeeding generations or integration of the nucleic acid molecule into the host cell genome.

[0965] Methods which are well known to those skilled in the art can be used to construct vectors encoding antigen binding polypeptides and polypeptide complexes (e.g., CDR, VH, VL, heavy chain and/or light chain coding sequences and appropriate transcriptional and translational control signals). These methods include, for example, in vitro recombinant DNA techniques, synthetic techniques, and in vivo genetic recombination.

[0966] A vector can be transferred to a host cell by conventional techniques and the resulting cell can then be cultured by conventional techniques to produce an antigen binding polypeptide or antigen binding polypeptide complex comprising, e.g., six CDRs, VH, VL, VH and VL, heavy chain, light chain, or heavy and light chain, or a domain thereof (e.g., one or more CDRs, VH, VL, VH and VL, heavy chain, or light chain). Thus, provided herein are host cells containing a polynucleotide encoding an antigen binding polypeptide or polypeptide complex comprising, e.g., comprising six CDRs, VH, VL, VH and VL, heavy chain, light chain, or heavy and light chain, or a domain thereof (e.g., one or more CDRs, VH, VL, VH and VL, heavy chain, or light chain), operably linked to a promoter for expression of such sequences in the host cell. In some aspects, vectors encoding both heavy and light chains, or a domain thereof, individually, can be co-expressed in the host cell for expression. In some aspects, a host cell contains a vector comprising a polynucleotide encoding both a heavy chain and light chain, or a domain thereof. In some aspects, a host cell contains two different vectors, a first vector comprising a polynucleotide encoding a heavy chain or a domain thereof, and a second vector comprising a polynucleotide encoding a light chain or a domain thereof. In some aspects, a first host cell comprises a first vector comprising a polynucleotide encoding a heavy chain or a domain thereof, and a second host cell comprises a second vector comprising a polynucleotide encoding a light chain or a domain thereof. In some aspects, provided herein is a population of host cells comprising such a first host cell and such a second host cell.

[0967] In some aspects, provided herein is a population of vectors comprising a first vector comprising a polynucleotide encoding a light chain or domain thereof, and a second vector comprising a polynucleotide encoding a heavy chain or domain thereof. Alternatively, a single vector can be used which encodes, and is capable of expressing, both heavy and light chain polypeptides or a domain thereof.

[0968] A variety of host-vector systems can be utilized to express the polypeptides and polypeptide complexes provided herein. Such host-vector systems represent vehicles by which the coding sequences of interest can be produced and subsequently purified, but also represent cells which can, when transformed or transfected with the appropriate nucleotide coding sequences, express a polypeptide or polypeptide complex provided herein in situ. These include but are not limited to microorganisms such as bacteria (e.g., E. coli and B. subtilis) transformed with recombinant bacteriophage DNA, plasmid DNA or cosmid DNA expression vectors containing antibody coding sequences; yeast (e.g., Saccharomyces pichia) transformed with recombinant yeast expression vectors containing antibody coding sequences; insect cell systems infected with recombinant virus expression vectors (e.g., baculovirus) containing antibody coding sequences; plant cell systems (e.g., green algae such as Chlamydomonas reinhardtii) infected with recombinant virus expression vectors (e.g., cauliflower mosaic virus, CaMV; tobacco mosaic virus, TMV) or transformed with recombinant plasmid expression vectors (e.g., Ti plasmid) containing antibody coding sequences; or mammalian cell systems (e.g., COS (e.g., COS1 or COS), CHO, BHK, MDCK, HEK 293, NS0, PER.C6, VERO, CRL7030, HsS78Bst, HeLa, and NIH 3T3, HEK-293T, HepG2, SP210, R1.1, B-W, L-M, BSC1, BSC40, YB/20, and BMT10 cells) harboring recombinant expression constructs containing promoters derived from the genome of mammalian cells (e.g., metallothionein promoter) or from mammalian viruses (e.g., the adenovirus late promoter; the vaccinia virus 7.5K promoter). In some aspects, cells for expressing polypeptide or polypeptide complexes described herein are CHO cells, for example CHO cells from the CHO GS System™ (Lonza). In some aspects, cells for expressing the polypeptides or polypeptide complexes provided herein are human cells, e.g., human cell lines. In some aspects, a mammalian expression vector is pOptiVEC™ or pcDNA3.3. In some aspects, bacterial cells such as Escherichia coli, or eukaryotic cells (e.g., mammalian cells) are used for the expression of recombinant polypeptides. For example, mammalian cells such as Chinese hamster ovary (CHO) cells in conjunction with a vector such as the major intermediate early gene promoter element from human cytomegalovirus is an effective expression system for polypeptides (Foecking M K & Hofstetter H (1986) Gene 45: 101-105; and Cockett M I et al., (1990) Biotechnology 8: 662-667). In some aspects, the polypeptides or polypeptide complexes provided herein are produced by HEK-293T cells.

[0969] In addition, a host cell strain can be chosen which modulates the expression of the inserted sequences, or modifies and processes the gene product in the specific fashion desired. Such modifications (e.g., glycosylation) and processing (e.g., cleavage) of protein products can contribute to the function of the protein. To this end, eukaryotic host cells which possess the cellular machinery for proper processing of the primary transcript, glycosylation, and phosphorylation of the gene product can be used. Such mammalian host cells include but are not limited to CHO, VERO, BHK, Hela, MDCK, HEK 293, NIH 3T3, W138, BT483, Hs578T, HTB2, BT20 and T47D, NS0 (a murine myeloma cell line that does not endogenously produce any immunoglobulin chains), CRL7030, COS (e.g., COS1 or COS), PER.C6, VERO, HsS78Bst, HEK-293T, HepG2, SP210, R1.1, B-W, L-M, BSC1, BSC40, YB/20, BMT10 and HsS78Bst cells.

[0970] Once a polypeptide or polypeptide complex provided herein has been produced by recombinant expression, it can be purified by any method known in the art for purification of a protein or immunoglobulin molecule, for example, by chromatography (e.g., ion exchange, affinity, particularly by affinity for the specific antigen after Protein A, and size exclusion chromatography), centrifugation, differential solubility, or by any other standard technique for the purification of proteins. Further, the polypeptides or polypeptide complexes provided herein can be fused to heterologous polypeptide sequences provided herein (e.g., peptide tags) or otherwise known in the art to facilitate purification.

[0971] In some aspects, a polypeptide or polypeptide complex provided herein is isolated or purified. Generally, an isolated polypeptide or polypeptide complex is one that is substantially free of other polypeptides or polypeptide complexes with different antigenic specificities. For example, in some aspects, a preparation of a polypeptide or polypeptide complex described herein is substantially free of cellular material and/or chemical precursors.

### Pharmaceutical Compositions and Kits

[0972] In some aspects, provided herein is a pharmaceutical composition comprising an antigen binding polypeptide, antigen binding polypeptide complex (e.g., antibody or antigen binding fragment thereof), polypeptide, polynucleotide, vector, or host cell provided herein.

[0973] In some aspects, a pharmaceutical composition provided herein comprises (1) an antigen binding polypeptide, antigen binding polypeptide complex (e.g., antibody or antigen binding fragment thereof), polypeptide, polynucleotide, vector, or host cell provided herein, and (2) a pharmaceutically acceptable carrier. The term “pharmaceutically acceptable carrier” includes any and all solvents, co-solvents, complexing agents, dispersion media, coatings, antibacterial and antifungal agents, isotonic and absorption delaying agents, and the like, which are not biologically or otherwise undesirable. The use of such media and agents for pharmaceutically active substances is known in the art. Except insofar as any conventional media or agent is incompatible with the active ingredient, its use in the therapeutic formulations is contemplated. Supplementary active ingredients can also be incorporated into the pharmaceutical compositions provided herein. In addition, various excipients, such as are commonly used in the art, can be included. These and other such compounds are described in the literature, e.g., in the Merck Index, Merck & Company, Rahway, NJ. Considerations for the inclusion of various components in pharmaceutical compositions are described, e.g., in Gilman et al. (Eds.) (2010); Goodman and Gilman's: The Pharmacological Basis of Therapeutics, 12th Ed., The McGraw-Hill Companies. In some aspects, the pharmaceutical composition is for parenteral, intravenous or subcutaneous administration.

[0974] In some aspects, provided herein is a pharmaceutical composition comprising one or more antigen binding polypeptides or antigen binding polypeptide complexes provided herein (e.g., 1, 2, 3, 4, 5 or more). In some aspects, the pharmaceutical composition further comprises a pharmaceutically acceptable carrier. In some aspects, one or more of the antigen binding polypeptides or antigen binding polypeptide complexes is an antibody or antigen binding fragment thereof provided herein. In some aspects, the antigen binding polypeptide complex is MX828, MX829, MX830, MX831, MX834, MX837, MX835, MX838, MX1042 or MX1069.

[0975] In some embodiments, the present invention comprises a combination of a monoclonal antibody(ies) and an antigen binding polypeptide or antigen binding polypeptide complex which comprises a multispecific antibody.

[0976] In some aspects, the present invention comprises a nucleic acid encoding an antigen binding polypeptide or antigen binding polypeptide complex for in vivo administration. In some aspects, the nucleic acid encoding an antigen binding polypeptide or antigen binding polypeptide complex is a stabilized nucleic acid selected from a stabilized mRNA.

[0977] In some aspects, the present disclosure relates to one or more mRNA that encodes an antigen binding polypeptide or antigen binding polypeptide complex (e.g., antibody or antigen binding fragment thereof). Examples of such mRNA include, but are not limited to, any one of SEQ ID NOs:695-702.

[0978] In some aspects, a nucleic acid encoding an antigen binding polypeptide or antigen binding polypeptide complex comprises said nucleic acid or mRNA and a carrier to form a pharmaceutical composition.

[0979] In some aspects, a pharmaceutical composition provided herein comprises a lipid nanoparticle composition. As used herein, a “lipid nanoparticle composition,” “lipid nanoparticle formulation,” “LNP composition,” or “LNP formulation” is a composition comprising one or more lipids. The lipids in a lipid nanoparticle composition are typically sized on the order of micrometers or smaller. In some aspects, the lipids in a lipid nanoparticle composition have an average size of less than 1 micrometer.

[0980] In some aspects, the pharmaceutical composition comprises (1) one or more polynucleotides encoding an antigen binding polypeptide or antigen binding polypeptide complex provided herein, and (2) a lipid nanoparticle composition. In some aspects, the lipid nanoparticle composition comprises one or more of (i) a cationic and/or ionizable lipid, (ii) a structural lipid, (iii) a PEGylated lipid, and (iv) a phospholipid.

[0981] As used herein, a “cationic and/or ionizable lipid” is a lipid that has a positive or partial positive charge at physiological pH. Examples of a cationic and/or ionizable lipid include, but are not limited to, a lipid including a cyclic amine group, 3-(didodecylamino)-N1,N1,4-tridodecyl-1-piperazineethanamine (KL10), N1-[2-(didodecylamino)ethyl]-N1,N4,N4-tridodecyl-1,4-piperazinediethanamine (KL22), 14,25-ditridecyl-15,18,21,24-tetraaza-octatriacontane (KL25), 1,2-dilinoleyloxy-N,N-dimethylaminopropane (DLin-DMA), 2,2-dilinoleyl-4-dimethylaminomethyl-[1,3]-dioxolane (DLin-K-DMA), heptatriaconta-6,9,28,31-tetraen-19-yl 4-(dimethylamino)butanoate (DLin-MC3-DMA), 2,2-dilinoleyl-4-(2-dimethylaminoethyl)-[1,3]-dioxolane (DLin-KC2-DMA), 1,2-dioleyloxy-N,N-dimethylaminopropane (DODMA), 2-({8-[(33)-cholest-5-en-3-yloxy]octyl}oxy)-N,N-dimethyl-3-[(9Z,12Z)-octadeca-9,12-dien-1-yloxy]propan-1-amine (Octyl-CLinDMA), (2R)-2-({8-[(3P)-cholest-5-en-3-yloxy]octyl}oxy)-N,N-dimethyl-3-[(9Z,12Z)-octadeca-9,12-dien-1-yloxy]propan-1-amine (Octyl-CLinDMA (2R)), (2S)-2-({8-[(30)-cholest-5-en-3-yloxy]octyl}oxy)-N,N-dimethyl-3-[(9Z,12Z)-octadeca-9,12-dien-1-yloxy]propan-1-amine (Octyl-CLinDMA (2S)), and mixtures thereof.

[0982] As used herein, a “structural lipid” is a fat synthesized from mixtures of long-chain and medium-chain fatty acids. A structural lipid is typically a triacylglycerol restructured or modified to change the fatty acid composition and/or positional distribution. Examples of a structural lipid include, but are not limited to, cholesterol, fecosterol, sitosterol, ergosterol, campesterol, stigmasterol, brassicasterol, tomatidine, tomatine, ursolic acid, alpha-tocopherol, and mixtures thereof.

[0983] As used herein, a “PEGylated lipid” is a lipid that has been modified to include polyethylene glycol or “PEG.” Examples of a PEGylated lipid include, but are not limited to, PEG-modified phosphatidylethanolamines, PEG-modified phosphatidic acids, PEG-modified ceramides, PEG-modified dialkylamines, PEG-modified diacylglycerols, PEG-modified dialkylglycerols, PEG-c-DOMG, PEG-DMG, PEG-DLPE, PEG-DMPE, PEG-DPPC, a PEG-DSPE lipid, and mixtures thereof.

[0984] As used herein, a “phospholipid” is a class of lipids whose molecule has a hydrophilic “head” containing a phosphate group and two hydrophobic “tails” derived from fatty acids, joined by an alcohol residue (usually a glycerol molecule). Examples of a phospholipid include, but are not limited to, 1,2-distearoyl-sn-glycero-3-phosphocholine (DSPC), 1,2-dioleoyl-sn-glycero-3-phosphoethanolamine (DOPE), 1,2-dilinoleoyl-sn-glycero-3-phosphocholine (DLPC), 1,2-dimyristoyl-sn-glycero-phosphocholine (DMPC), 1,2-dioleoyl-sn-glycero-3-phosphocholine (DOPC), 1,2-dipalmitoyl-sn-glycero-3-phosphocholine (DPPC), 1,2-diundecanoyl-sn-glycero-phosphocholine (DUPC), 1-palmitoyl-2-oleoyl-sn-glycero-3-phosphocholine (POPC), 1,2-di-O-octadecenyl-sn-glycero-3-phosphocholine (18:0 Diether PC), 1-oleoyl-2-cholesterylhemisuccinoyl-sn-glycero-3-phosphocholine (OChemsPC), 1-hexadecyl-sn-glycero-3-phosphocholine (C16 Lyso PC), 1,2-dilinolenoyl-sn-glycero-3-phosphocholine, 1,2-diarachidonoyl-sn-glycero-3-phosphocholine, 1,2-didocosahexaenoyl-sn-glycero-3-phosphocholine, 1,2-diphytanoyl-sn-glycero-3-phosphoethanolamine (ME 16.0 PE), 1,2-distearoyl-sn-glycero-3-phosphoethanolamine, 1,2-dilinoleoyl-sn-glycero-3-phosphoethanolamine, 1,2-dilinolenoyl-sn-glycero-3-phosphoethanolamine, 1,2-diarachidonoyl-sn-glycero-3-phosphoethanolamine, 1,2-didocosahexaenoyl-sn-glycero-3-phosphoethanolamine, 1,2-dioleoyl-sn-glycero-3-phospho-rac-(1-glycerol) sodium salt (DOPG), sphingomyelin, and mixtures thereof. In some aspects, the phospholipid is DSPC. In some aspects, the phospholipid is DOPE. In some aspects, the phospholipid is DSPC and DOPE.

[0985] Exemplary lipid nanoparticle compositions and methods for making them are described, for example, herein and in U.S. Pat. Nos. 11,524,023; 11,485,972; 10,898,574; 10,703,789; 10,702,600; 10,577,403; 10,442,756; 10,266,485; 10,064,959; 9,868,692; Int'l Pub. No. WO 2019/046809; Int'l Pub. No. WO 2020/160397; U.S. Pub. No. 2020/0306191; Xu et al., Adv. Nanobio. Res. 2:2, 2022; Cullis et al., Mol. Ther. 25(7):1467-1475, 2017; Fan et al., J. Pharm. Biomed. Anal. 192:113642, 2020; Paunovska et al., Nature Rev., 23:265-280, 2022; Buck et al., ACS Nano. 13:3754-3782, 2019; Pardi et al., Nature Comm. 8:14630, 2017; and Pardi et al., J. Control Release, 217:345-351, 2015, which are incorporated by reference herein. Such methods include, but are not limited to, back translating DNA coding for an antigen binding polypeptide or antigen binding polypeptide complex provided herein (e.g., an antibody or antigen binding fragment thereof) into an in vitro transcription (IVT) plasmid according to such published methods.

[0986] Exemplary compositions and methods related to mRNA preparation and delivery are described, for example, herein and in Int'l Pub. No. WO 2018/081638, Int'l Pub. No. WO 2017/182524, U.S. Pat. No. 9,012,219, Int'l Pub. No. WO 2016/176330, U.S. Pat. No. 9,371,511, U.S. Appl. Pub. No. 2018/0028645, U.S. Appl. Pub. No. 23018/0344838, U.S. Pub. No. 2018/0265848, U.S. Appl. Pub. No. 2017/0043037, U.S. Appl. Pub. No. 2017/0327842, U.S. Pat. No. 10,006,007, U.S. Appl. Pub. No. 2013/0261172, U.S. Appl. Pub. No. 2013/0197068, U.S. Appl. Pub. No. 2015/0038558, U.S. Appl. Pub. No. 2016/0032316, U.S. Appl. Pub. No. 2013/0111615, U.S. Appl. Pub. No. 2009/0286852, Cullis et al., Mol. Ther. 25(7):1467-1475, 2017; Pardi et al., Nature Comm. 8:14630, 2017; Pardi et al., J. Control Release, 217:345-351, 2015; and Grier et al., Mol. Ther. Nucleic Acids, 5:e306 (2016), which are incorporated by reference herein. Such methods include, but are not limited to, in vitro transcription (e.g., using PCR products or a linearized plasmid); IVT vectors; and synthesizing mRNA using, e.g., HiScribe T7 High Yield RNA Synthesis Kit (New England Biolabs), incorporating, e.g., Pseudouridine-5′-Triphosphate (TriLink BioTechnologies). In some aspects, 5′ capped mRNA can also be generated during this process using, e.g., CleanCap Reagent AG (TriLink BioTechnologies) to form, e.g., 100 bp or 120 bp poly(A) tails.

[0987] In some aspects, provided herein is a pharmaceutical composition comprising one or more antigen binding polypeptides or antigen binding polypeptide complexes provided herein (e.g., 1, 2, 3, 4, 5 or more) and an additional pharmaceutical agent. In some aspects, the pharmaceutical composition further comprises a pharmaceutically acceptable carrier. In some aspects, one or more of the antigen binding polypeptides or antigen binding polypeptide complexes is an antibody or antigen binding fragment thereof provided herein. In some aspects, the antigen binding polypeptide complex is MX828, MX829, MX830, MX831, MX834, MX837, MX835, MX838, MX1042 or MX1069.

[0988] In some aspects, provided herein is a pharmaceutical composition comprising a combination of antigen binding polypeptides or antigen binding polypeptide complexes provided herein. In some aspects, the pharmaceutical composition comprises two or more of MX828, MX829, MX830, MX831, MX834, MX837, MX835, MX838, MX1042 and MX1069. In some aspects, the pharmaceutical composition comprises MX828 and MX829. In some aspects, the pharmaceutical composition comprises MX830 and MX831.

[0989] In some aspects, provided herein is a pharmaceutical composition comprising an antigen binding polypeptide or antigen binding polypeptide complex provided herein and an additional pharmaceutical agent. In some aspects, the antigen binding polypeptide complex is MX828, MX829, MX830, MX831, MX834, MX837, MX835, MX838, MX1042, MX1069, or a combination thereof.

[0990] In some aspects, the additional pharmaceutical agent is 25-hydroxyvitamin D, an agent that potentiates vitamin D action, an anti-viral agent, an anti-malarial agent, an antibiotic, or a combination thereof.

[0991] In some aspects, the additional pharmaceutical agent is 25-hydroxyvitamin D.

[0992] In some aspects, the agent that potentiates vitamin D action is a CYP24 inhibitor, 1,25-dihydroxyvitamin D compound, or a combination thereof.

[0993] In some aspects, the anti-viral agent is an anti-retroviral agent, an antibody against SARS-CoV-2 virus, an inhibitor of reverse transcriptase, or a combination thereof.

[0994] In some aspects, the anti-viral agent is maraviroc, enfuvirtide, amantadine, lamivudine, nevirapine, efavirenz, dolutegravir, elvitegravir, raltegravir, acyclovir and any nucleoside analog of aciclovir, ganciclovir, cidofovir, forcarnet, ribavirin, interferon alpha, pegylated interferon alpha, boceprevir, atazanavir, darunavir, indinavir, oseltamivir, zanamivir, rimantadine, peremivir, valaciclovir, penciclovir, valganciclovir, foscarnet, tenofovir, adefovir, entecavir, lamivudine, telbivudine, ribavirin, glecaprevir, grazoprevir, paritaprevir, simeprevir, voxilaprevir, daclatasvir, elbasvir, ledipasvir, ombitasvir, pibrentasvir, velpatasvir, dasabuvir, famciclovir, remdesivir, trifluridine, sofobuvir, bebtelovimab (LY1404, LY-CoV1404, LY3853133), or a combination thereof.

[0995] In some aspects, the anti-viral agent is bebtelovimab.

[0996] In some aspects, the anti-viral agent is Retrovir® (3′-azido-3′-deoxypyrimidine, zidovudine), 3′-azido-3′-deoxythymidine (AZT), HMD® (2′,3′-dideoxycytidine, zalcitabine), VidexEC® (2′,3′dideoxyinosine, didanosine), Epivir® (lamivudine), Zerit® (stavudine), Viread® (tenofovir DF), Ziagen® (abacavir), Emtriva® (emtricitabine, FTC), Rescriptor® (delavirdine), Sustiva® (efavirenz), Viramune® (nevirapine, 11-cyclopropyl-4-methyl-5,11-dihydro-6H-dipyrido[3,2-b:2′,3′-e][1,4]diazepin-6-one), trisodium phosphonoformate, ammonium-21-tungstenato-9-antimonate, 1-β-D-ribofuranoxyl-1,2,4-triazole-3-carboxamide, Aganerase® (amprenavir), Reyataz® (atazanavir), Lexiva® (fosamprenavir), Crixivan® (indinavir), Viracept® (nelfinavir), Norvir® (ritonavir), Fortovase® or Invirase® (saquinavir), lasinavir (5(S)-(tert-butoxycarbonylamino)-4(S)-hydroxy-6-phenyl-2(R)(2,3,4-trimethoxyphenylmethyl)-hexanoyl-(L)-valyl-N-(2-metoxy-ethyl)-amide), adriamycin, KVX-478, VX-478, 141W94, AG-1343, KNI-272, U-96988, BILA-2011 BS (palinavir), polymannoacetate, Fuzeon® (enfuvirtide, T-20), Epzicom® (abacavir and lamivudine), Trizivir® (abacavir, lamivudine and zidovudine), Truvada® (emtricitabine and tenofir DF), Combivir® (lamivudine and zidovudine), Kaletra® (lopinavir and ritonavir), bebtelovimab, or a combination thereof.

[0997] In some aspects, the pharmaceutical composition comprises bebtelovimab and one or more of MX828, MX829, MX830, MX831, MX834, MX837, MX835, MX838, MX1042 or MX1069. In some aspects, the pharmaceutical composition comprises bebtelovimab and MX828. In some aspects, the pharmaceutical composition comprises bebtelovimab and MX830. In some aspects, the pharmaceutical composition comprises bebtelovimab, MX828 and MX829. In some aspects, the pharmaceutical composition comprises bebtelovimab, MX830 and MX831.

[0998] In some aspects, a pharmaceutical composition provided herein further comprises a pharmaceutically acceptable carrier.

[0999] In some aspects, provided herein is a kit comprising an antigen binding polypeptide, antigen binding polypeptide complex (e.g., antibody or antigen binding fragment thereof), polypeptide, polynucleotide, vector, host cell, or pharmaceutical composition provided herein, or a combination thereof. Once a pharmaceutical composition has been formulated, it can be stored in sterile vials as a solution, suspension, gel, emulsion, solid, crystal, or as a dehydrated or lyophilized powder. Such formulations may be stored either in a ready-to-use form or in a form (e.g., lyophilized) that is reconstituted prior to administration. In some aspects, provided herein is a kit for producing a single-dose administration unit. In some aspects, the kit contains a first container having a dried antigen binding polypeptide or polypeptide complex provided herein (e.g., antibody or antigen binding fragment thereof) and a second container having an aqueous formulation. In some aspects, provided herein is a kit containing an antigen binding polypeptide or polypeptide complex provided herein (e.g., antibody or antigen binding fragment thereof) in a single and/or multi-chambered pre-filled syringe (e.g., liquid syringe and/or lyosyringe). In some aspects, the kit further contains components for intravenous or subcutaneous administration.

[1000] In some aspects, a kit provided herein comprises one or more antigen binding polypeptides or antigen binding polypeptide complexes (e.g., antibodies or antigen binding fragments thereof) provided herein (e.g., 1, 2, 3, 4, 5 or more). In some aspects, a kit provided herein comprises an antigen binding polypeptide or antigen binding polypeptide complexes (e.g., antibodies or antigen binding fragments thereof) provided herein.

[1001] In some aspects, a kit provided herein comprises one or more pharmaceutical compositions comprising an antigen binding polypeptide complex (e.g., antibody or antigen binding fragment thereof) provided herein (e.g., 1, 2, 3, 4, 5 or more). In some aspects, a kit provided herein comprises a pharmaceutical compositions comprising an antigen binding polypeptide complexes (e.g., antibody or antigen binding fragment thereof) provided herein. In some aspects, the pharmaceutical composition further comprises a pharmaceutically acceptable carrier.

[1002] In some aspects, a kit provided herein comprises (i) one or more antigen binding polypeptide complexes (e.g., antibodies or antigen binding fragments thereof) provided herein (e.g., 1, 2, 3, 4, 5 or more), and (ii) one or more additional pharmaceutical agents (e.g., 1, 2, 3, 4, 5 or more). In some aspects, a kit provided herein comprises (i) an antigen binding polypeptide complex (e.g., antibody or antigen binding fragment thereof) provided herein, and (ii) an additional pharmaceutical agent.

[1003] In some aspects, a kit provided herein comprises (i) one or more pharmaceutical compositions comprising an antigen binding polypeptide complex (e.g., antibody or antigen binding fragment thereof) provided herein (e.g., 1, 2, 3, 4, 5 or more), and (ii) one or more additional pharmaceutical agents (e.g., 1, 2, 3, 4, 5 or more). In some aspects, a kit provided herein comprises (i) a pharmaceutical composition comprising an antigen binding polypeptide complex (e.g., antibody or antigen binding fragment thereof) provided herein, and (ii) an additional pharmaceutical agent. In some aspects, the pharmaceutical composition further comprises a pharmaceutically acceptable carrier.

[1004] In some aspects, the kit further comprises instructions for use, for example, for any of the methods of use described herein (e.g., treating or preventing a SARS-CoV-2 infection).

[1005] In some aspects, the antigen binding polypeptide complex is MX828, MX829, MX830, MX831, MX834, MX837, MX835, MX838, MX1042 or MX1069, and the additional pharmaceutical agent is bebtelovimab. In other aspects, the antigen binding polypeptide complex is selected from any one of those listed in Table 1.

TABLE 1

| MX Number | FIG. | VH/VL pairs | msAb SEQ ID NO: |
|---|---|---|---|
| MX241 | FIG. 1A | B1-182 | 78, 78 |
| MX365 | FIG. 1B | B1-182 | 79, 79 |
| MX180 | FIG. 2B | B1-182.A19-46 | 83, 83 |
| MX183 | FIG. 2C | A19-61, B1-182 | 84, 84 |
| MX179 | FIG. 2A | A19-46, B1-182 | 82, 82 |
| MX184 | FIG. 2D | B1-182, A19-61 | 85, 85 |
| MX366 | FIG. 2E | A19-61, B1-182 | 88, 88 |
| MX367 | FIG. 2F | B1-182, A19-61 | 89, 89 |
| MX413 | FIG. 2H | A19-61, A23-58H/B1-182L | 91, 91 |
| MX490 | FIG. 21 | A23-58H/B1-182L, A19-46 | 94, 94 |
| MX492 | FIG. 2J | A19-46, A23-58H/B1-182L | 96, 96 |
| MX412 | FIG. 2G | A23-58H/B1-182L, A19-61 | 90, 90 |
| MX467 | FIG. 2K | A23-58H/B1-182L, A19-61 | 92, 92 |
| MX468 | FIG. 2L | A19-61, A23-58H/B1-182L | 93, 93 |
| MX491 | FIG. 2M | A23-58H/B1-182L, A19-46 | 95, 95 |
| MX493 | FIG. 2N | A19-46, A23-58H/B1-182L | 97, 97 |
| MX326 | FIG. 20 | A19-61, A23-58 | 86, 86 |
| MX327 | FIG. 2P | A23-58, A19-61 | 87, 87 |
| MX494 | FIG. 3A | A19-46, A19-61, B1-182, B1-182 | 98, 99 |
| MX495 | FIG. 3B | B1-182, A19-61, B1-182, A19-46 | 100, 101 |
| MX496 | FIG. 3C | A19-46, B1-182, A19-61, B1-182 | 102, 103 |
| MX497 | FIG. 3D | B1-182, B1-182, A19-61, A19-46 | 104, 105 |
| MX498 | FIG. 3E | A23-58H/B1-182L, A23-58H/B1-182L, | 106, 107 |
| | | A19-46, A19-61 | |
| MX499 | FIG. 3F | A19-61, A23-58H/B1-182L, A19-46, | 108, 109 |
| | | A23-58H/B1-182L | |
| MX500 | FIG. 3G | A23-58H/B1-182L, A19-46, A23- | 110, 111 |
| | | 58H/B1-182L, A19-61 | |
| MX501 | FIG. 3H | A19-61, A19-46, A23-58H/B1-182L, | 112, 113 |
| | | A23-58H/B1-182L | |
| MX828 | FIG. 11 | A19-46, A19-46, A23-58H/A23- | 190, 190 |
| | | 58L93VGLTG, A23-58H/A23- | |
| | | 58L93VGLTG | |
| MX829 | FIG. 11 | A19-61, A19-61, A23-58H/A23- | 191, 191 |
| | | 58L93VGLTG, A23-58H/A23- | |
| | | 58L93VGLTG | |
| MX830 | FIG. 11 | A19-46, A19-46, A23-58H/A23- | 192, 192 |
| | | 58L94GLTG, A23-58H/A23- | |
| | | 58L94GLTG | |
| MX831 | FIG. 11 | A19-61, A19-61, A23-58H/A23- | 193, 193 |
| | | 58L94LGTG, A23-58H/A23- | |
| | | 58L94GLTG | |
| MX834 | FIG. 11 | A23-58H/A23-58L93VGLTG, A19-46, | 194, 195 |
| | | A23-58H/A23-58L93VGLTG, A19-61 | |
| MX837 | FIG. 11 | A19-61, A19-46, A23-58H/A23- | 196, 197 |
| | | 58L93VGLTG, A23-58H/A23- | |
| | | 58L93VGLTG | |
| MX835 | FIG. 11 | A23-58H/A23-58L94GLTG, A19-46, | 198, 199 |
| | | A23-58H/A23-58L94GLTG, A19-61 | |
| MX838 | FIG. 11 | A19-61, A19-46, A23-58H/A23- | 200, 201 |
| | | 58L94GLTG, A23-58H/A23- | |
| | | 58L94gLTG | |
| MX1019 | FIG. 17A | B8, B8 | 329, 330 |
| MX1025 | FIG. 17B | E12, E12 | 331, 332 |
| MX1026 | FIG. 17C | E8, E8 | 333, 334 |
| MX1018 | FIG. 17D | B8, B8, B8, B8 | 291, 292 |
| MX1029 | FIG. 17E | E12, E12, E12, E12 | 295, 295 |
| MX1020 | FIG. 17F | E8, E8, E8, E8 | 297, 297 |
| MX1021 | FIG. 18A | A19-46, A19-46, B8, B8 | 299, 299 |
| MX1022 | FIG. 18B | E8, E8, B8, B8 | 301, 301 |
| MX1023 | FIG. 18C | B8, B8, A19-46, A19-46 | 303, 303 |
| MX1024 | FIG. 18D | B8, B8, E8, E8 | 305, 305 |
| MX1027 | FIG. 18E | A19-46, B8, A19-46, B8 | 307, 307 |
| MX1028 | FIG. 18F | E8, B8, E8, B8 | 311, 311 |
| MX1054 | FIG. 19A | B8, A19-46, B8, E8 | 345, 347 |
| MX1062 | FIG. 19B | E8, A19-46, B8, B8 | 349, 351 |
| MX1063 | FIG. 19C | B8, B8, A19-46, E8 | 353, 355 |
| MX1064 | FIG. 19D | E8, B8, A19-46, B8 | 357, 359 |
| MX1065 | FIG. 19E | A19-46, A19-46, B8, E8 | 361, 363 |
| MX1066 | FIG. 19F | E8, A19-46, B8, A19-46 | 365, 367 |
| MX1067 | FIG. 19G | A19-46, B8, A19-46, E8 | 369, 371 |
| MX1068 | FIG. 19H | E8, B8, A19-46, A19-46 | 373, 375 |
| MX1055 | FIG. 19I | E8, B8, E8, A19-46 | 377, 379 |
| MX1056 | FIG. 19J | E8, E8, B8, A19-46 | 381, 383 |
| MX1057 | FIG. 19K | B8, A19-46, E8, E8 | 385, 387 |
| MX1058 | FIG. 19L | E8, A19-46, E8, B8 | 389, 391 |
| MX1041 | FIG. 20A | A19-46, A19-46, E12, E12 | 315, 315 |
| MX1042 | FIG. 20B | E8, E8, E12, E12 | 256, 256 |
| MX1043 | FIG. 20C | E12, E12, A19-46, A19-46 | 317, 317 |
| MX1044 | FIG. 20D | E12, E12, E8, E8 | 319, 319 |
| MX1045 | FIG. 20E | A19-46, E12, A19-46, E12 | 321, 323 |
| MX1046 | FIG. 20F | E8, E12, E8, E12 | 325, 327 |
| MX1069 | FIG. 16A | E12, A19-46, E12, E8 | 257, 258 |
| MX1070 | FIG. 16B | E8, A19-46, E12, E12 | 395, 397 |
| MX1071 | FIG. 16C | E12, E12, A19-46, E8 | 399, 401 |
| MX1072 | FIG. 16D | E8, E12, A19-46, E12 | 403, 405 |
| MX1073 | FIG. 16E | A19-46, A19-46, E12, E8 | 407, 409 |
| MX1074 | FIG. 16F | E8, A19-46, E12, A19-46 | 411, 413 |
| MX1075 | FIG. 16G | A19-46, E12, A19-46, E8 | 415, 417 |
| MX1076 | FIG. 16H | E8, E12, A19-46, A19-46 | 419, 421 |
| MX1077 | FIG. 16I | E8, E12, E8, A19-46 | 423, 425 |
| MX1078 | FIG. 16J | E8, E8, E12, A19-46 | 427, 429 |
| MX1079 | FIG. 16K | E12, A19-46, E8, E8 | 431, 433 |
| MX1080 | FIG. 16L | E8, A19-46, E8, E12 | 435, 437 |
| MX1086 | FIG. 17A | B8, A19-46, E12, E8 | 487, 489 |
| MX1087 | FIG. 17B | E12, A19-46, B8, E8 | 495, 497 |
| MX1088 | FIG. 17C | E8, A19-46, A23-58H/L93VGLTG, B8 | 491, 493 |
| MX1089 | FIG. 17D | E8, A19-46, B8, A23-58H/L93VGLTG | 499, 501 |
| MX1206 | FIG. 17E | E8, A19-46, E12, A23-58H/L93VGLTG | 503, 505 |
| MX1152 | FIG. 18A | A19-46, A19-46, A23-58H/L93VGLTG, | 441, 441 |
| | | E8 | |
| MX1081 | FIG. 18B | E8, A19-46, A23-58H/L93VGLTG, | 439, 441 |
| | | A19-46 | |
| MX1153 | FIG. 18C | A23-58H/L93VGLTG, A23- | 447, 449 |
| | | 58H/L93VGLTG, A19-46, E8 | |
| MX1154 | FIG. 18D | E8, A23-58H/L93VGLTG, A19-46, | 451, 453 |
| | | A23-58H/L93VGLTG | |
| MX1155 | FIG. 18E | A19-46, A19-46, A23-58H/L93VGLTG, | 455, 457 |
| | | E8 | |
| MX1082 | FIG. 18F | E8, A19-46, A23-58H/L93VGLTG, | 459, 461 |
| | | A19-46 | |
| MX1156 | FIG. 18G | A19-46, A23-58H/L93VGLTG, E8, | 463, 465 |
| | | A19-46 | |
| MX1157 | FIG. 18H | E8, A23-58H/L93VGLTG, A19-46, | 467, 469 |
| | | A19-46 | |
| MX1083 | FIG. 18I | E8, A23-58H/L93VGLTG, E8, A19-46 | 471, 473 |
| MX1084 | FIG. 18J | E8, E8, A23-58H/L93VGLTG, A19-46 | 475, 477 |
| MX1158 | FIG. 18K | A23-58H/L93VGLTG, A19-46, E8, E8 | 479, 481 |
| MX1085 | FIG. 18L | E8, A19-46, E8, A23-58H/L93VGLTG | 483, 485 |

### Methods of Use

[1006] In some aspects, provided herein are certain methods of use of an antigen binding polypeptide, antigen binding polypeptide complex (e.g., an antibody or antigen binding fragment thereof), polypeptide, polynucleotide, vector, host cell, or pharmaceutical composition provided herein, or a combination thereof. Any of the antigen binding polypeptides, antigen binding polypeptide complexes (e.g., an antibody or antigen binding fragment thereof), polypeptides, polynucleotides, vectors, host cells, or pharmaceutical compositions provided herein described herein may be used in any of the methods and uses of the invention.

[1007] In some aspects, provided herein is a method of preventing or treating a SARS-CoV-2 infection, comprising administering an antigen binding polypeptide, antigen binding polypeptide complex (e.g., an antibody or antigen binding fragment thereof), polypeptide, polynucleotide, vector, host cell or pharmaceutical composition provided herein, or a combination thereof. In some aspects, provided herein is an antigen binding polypeptide, antigen binding polypeptide complex (e.g., antibody or antigen binding fragment thereof), polypeptide, polynucleotide, vector, cell, or pharmaceutical composition described herein, or a combination thereof, for use in treating or preventing a SARS-CoV-2 infection. In some aspects, provided herein is the use of an antigen binding polypeptide, antigen binding polypeptide complex (e.g., antibody or antigen binding fragment thereof), polypeptide, polynucleotide, vector, cell, or pharmaceutical composition described herein, or a combination thereof in the manufacture of a medicament for the treatment or prevention of a SARS-CoV-2 infection. In some aspects, preventing or treating a SARS-CoV-2 infection comprises administering a pharmaceutical composition comprising (1) one or more polynucleotides encoding an antigen binding polypeptide or antigen binding polypepetide complex provided herein, and (2) a lipid nanoparticle composition. In some aspects, the lipid nanoparticle composition comprises one or more of (i) a cationic and/or ionizable lipid, (ii) a structural lipid, (iii) a PEGylated lipid, and (iv) a phospholipid, as provided herein.

[1008] In some aspects, provided herein is a method of preventing or treating a SARS-CoV-2 infection in a subject in need thereof, comprising administering to the subject a therapeutically effective amount of an antigen binding polypeptide, antigen binding polypeptide complex (e.g., an antibody or antigen binding fragment thereof), polypeptide, polynucleotide, vector, host cell or pharmaceutical composition provided herein, or a combination thereof. In some aspects, provided herein is an antigen binding polypeptide, antigen binding polypeptide complex (e.g., antibody or antigen binding fragment thereof), polypeptide, polynucleotide, vector, cell, or pharmaceutical composition described herein, or a combination thereof, for use in treating or preventing a SARS-CoV-2 infection in a subject in need thereof. In some aspects, provided herein is the use of an antigen binding polypeptide, antigen binding polypeptide complex (e.g., antibody or antigen binding fragment thereof), polypeptide, polynucleotide, vector, cell, or pharmaceutical composition described herein, or a combination thereof in the manufacture of a medicament for the treatment or prevention of a SARS-CoV-2 infection in a subject in need thereof. In some aspects, preventing or treating a SARS-CoV-2 infection in a subject in need thereof comprises administering a pharmaceutical composition comprising (1) one or more polynucleotides encoding an antigen binding polypeptide or antigen binding polypepetide complex provided herein, and (2) a lipid nanoparticle composition. In some aspects, the lipid nanoparticle composition comprises one or more of (i) a cationic and/or ionizable lipid, (ii) a structural lipid, (iii) a PEGylated lipid, and (iv) a phospholipid, as provided herein.

[1009] In some aspects, provided herein is a method of preventing or treating coronavirus disease 2019 (COVID-19), comprising administering an antigen binding polypeptide, antigen binding polypeptide complex (e.g., an antibody or antigen binding fragment thereof), polypeptide, polynucleotide, vector, host cell or pharmaceutical composition, or a combination thereof. In some aspects, provided herein is an antigen binding polypeptide, antigen binding polypeptide complex (e.g., antibody or antigen binding fragment thereof), polypeptide, polynucleotide, vector, cell, or pharmaceutical composition described herein, or a combination thereof, for use in treating or preventing coronavirus disease 2019 (COVID-19). In some aspects, provided herein is the use of an antigen binding polypeptide, antigen binding polypeptide complex (e.g., antibody or antigen binding fragment thereof), polypeptide, polynucleotide, vector, cell, or pharmaceutical composition described herein, or a combination thereof in the manufacture of a medicament for the treatment or prevention of coronavirus disease 2019 (COVID-19). In some aspects, preventing or treating coronavirus disease 2019 (COVID-19) comprises administering a pharmaceutical composition comprising (1) one or more polynucleotides encoding an antigen binding polypeptide or antigen binding polypepetide complex provided herein, and (2) a lipid nanoparticle composition. In some aspects, the lipid nanoparticle composition comprises one or more of (i) a cationic and/or ionizable lipid, (ii) a structural lipid, (iii) a PEGylated lipid, and (iv) a phospholipid, as provided herein.

[1010] In some aspects, provided herein is a method of preventing or treating coronavirus disease 2019 (COVID-19) in a subject in need thereof, comprising administering to the subject a therapeutically effective amount of an antigen binding polypeptide, antigen binding polypeptide complex (e.g., an antibody or antigen binding fragment thereof), polypeptide, polynucleotide, vector, host cell or pharmaceutical composition, or a combination thereof. In some aspects, provided herein is an antigen binding polypeptide, antigen binding polypeptide complex (e.g., antibody or antigen binding fragment thereof), polypeptide, polynucleotide, vector, cell, or pharmaceutical composition described herein, or a combination thereof, for use in treating or preventing COVID-19 in a subject in need thereof. In some aspects, provided herein is the use of an antigen binding polypeptide, antigen binding polypeptide complex (e.g., antibody or antigen binding fragment thereof), polypeptide, polynucleotide, vector, cell, or pharmaceutical composition described herein, or a combination thereof in the manufacture of a medicament for the treatment or prevention of COVID-19 in a subject in need thereof. In some aspects, preventing or treating COVID-19 comprises administering a pharmaceutical composition comprising (1) one or more polynucleotides encoding an antigen binding polypeptide or antigen binding polypepetide complex provided herein, and (2) a lipid nanoparticle composition. In some aspects, the lipid nanoparticle composition comprises one or more of (i) a cationic and/or ionizable lipid, (ii) a structural lipid, (iii) a PEGylated lipid, and (iv) a phospholipid, as provided herein.

[1011] As used herein, the terms “prevent” or “preventing” refer to the prevention of the onset, recurrence or spread, in whole or in part, of a disease or condition provided herein, or a symptom thereof.

[1012] As used herein, the terms “treat” or “treatment” refer to therapeutic or palliative measures. Beneficial or desired clinical results include, but are not limited to, alleviation, in whole or in part, of symptoms associated with a disease or disorder or condition, diminishment of the extent of disease, stabilized (i.e., not worsening) state of disease, delay or slowing of disease progression, amelioration or palliation of the disease state (e.g., one or more symptoms of the disease), and remission (whether partial or total), whether detectable or undetectable. “Treatment” can also mean prolonging survival as compared to expected survival if not receiving treatment.

[1013] As used herein, “administering” is meant a method of giving a dosage of an antigen binding polypeptide or polypeptide complex (e.g., antibody or antigen binding fragment thereof) to a subject in need thereof (e.g., a patient). Administering can be by any suitable means, including parenteral, intrapulmonary or intranasal. Parenteral infusions include, for example, intramuscular, intravenous, intraarterial, intraperitoneal or subcutaneous administration. Dosing can be by any suitable route, e.g., by injection, such as intravenous or subcutaneous injection. Various dosing schedules including, but not limited to, single or multiple administrations over various time-points, bolus administration, and pulse infusion are contemplated herein.

[1014] As used herein, a “therapeutically effective amount” is an amount of an antigen binding polypeptide or antigen binding polypeptide complex (e.g., an antibody or antigen binding fragment thereof) that is sufficient to achieve the desired effect and can vary according to the nature and severity of the condition, and the potency of the polypeptide or polypeptide complex. In some aspects, the therapeutically effective amount is from about 5 ug/mL to about 100 ug/mL, or any value or range of values therein (in some aspects, e.g., over about 30 days post-infusion). In some aspects, the therapeutically effective amount is from about 5 ug/mL to about 75 ug/mL, from about 5 ug/mL to about 50 ug/mL, from about 5 ug/mL to about 25 ug/mL, from about 5 ug/mL to about 10 ug/mL, from about 10 ug/mL to about 100 ug/mL, from about 10 ug/mL to about 75 ug/mL, from about 10 ug/mL to about 50 ug/mL, from about 10 ug/mL to about 25 ug/mL, from about 25 ug/mL to about 100 ug/mL, from about 25 ug/mL to about 75 ug/mL, from about 25 ug/mL to about 50 ug/mL, from about 50 ug/mL to about 100 ug/mL, from about 50 ug/mL to about 75 ug/mL, or from about 75 ug/mL to about 100 ug/mL. In some aspects, the therapeutically effective amount is about 5 ug/mL, about 10 ug/mL, about 25 ug/mL, about 50 ug/mL, about 75 ug/mL, or about 100 ug/mL.

[1015] In some aspects, an antigen binding polypeptide or polypeptide complex can be delivered by administering a polynucleotide, vector, or host cell that encodes the antigen binding polypeptide or polypeptide complex. In some aspects, an antigen binding polypeptide or polypeptide complex thereof can be delivered by administering a pharmaceutical composition containing the polypeptide or polypeptide complex. A therapeutic effect is the relief, to at least some extent, of one or more symptoms of the disease or disorder, and can include curing a disease or disorder. “Curing” means that the symptoms of active disease are eliminated. However, certain long-term or permanent effects of a disease or disorder can exist even after a cure is obtained.

[1016] As used herein, the term “subject” means a human or a non-human mammal, e.g., a dog, cat, mouse, rat, cow, sheep, pig, goat, non-human primate or bird, e.g., chicken, as well as any other vertebrate or invertebrate. In some aspects, the subject is a human. In some aspects, the subject is a veterinary animal. In some aspects, the subject is a mammal.

[1017] In some aspects, provided herein is a method of diagnosing a subject as being infected with a SARS-CoV-2 virus or suspected of being infected with a SARS-CoV-2 virus, comprising (i) contacting a sample obtained from the subject with the antigen binding polypeptide or polypeptide complex (e.g., an antibody or antigen binding fragment thereof) provided herein; (ii) detecting the presence or absence of a virus complex which contains the polypeptide or polypeptide complex and a SARS-CoV-2 virus, virion or fragment thereof; and (iii) diagnosing the subject as being infected with a SARS-CoV-2 virus or suspected of being infected with a SARS-CoV-2 virus when the presence of the virus complex is detected. In some aspects, the method is performed in vitro or ex vivo.

[1018] In some aspects, provided herein is a method of diagnosing a subject as not being infected with a SARS-CoV-2 virus or not suspected of being infected with a SARS-CoV-2 virus, comprising (i) contacting a sample obtained from the subject with the antigen binding polypeptide or polypeptide complex (e.g., an antibody or antigen binding fragment thereof) provided herein; (ii) detecting the presence or absence of a virus complex which contains the polypeptide or polypeptide complex and a SARS-CoV-2 virus, virion or fragment thereof, and (iii) diagnosing the subject as not being infected with a SARS-CoV-2 virus or not being suspected of being infected with a SARS-CoV-2 virus when the presence of the virus complex is not detected. In some aspects, the method is performed in vitro or ex vivo.

[1019] In some aspects, provided herein is a method of diagnosing a subject as having COVID-19 or suspected of having COVID-19, comprising (i) contacting a sample obtained from the subject with an antigen binding polypeptide or polypeptide complex (e.g., an antibody or antigen binding fragment thereof) provided herein; (ii) detecting the presence or absence of a virus complex which contains the polypeptide or polypeptide complex and a SARS-CoV-2 virus, virion or fragment thereof, and (iii) diagnosing the subject as having COVID-19 or suspected or having COVID-19 when the presence of the virus complex is detected. In some aspects, the method is performed in vitro or ex vivo.

[1020] In some aspects, provided herein is a method of diagnosing a subject as not having COVID-19 or not suspected of having COVID-19, comprising (i) contacting a sample obtained from the subject with an antigen binding polypeptide or polypeptide complex (e.g., an antibody or antigen binding fragment thereof) provided herein; (ii) detecting the presence or absence of a virus complex which contains the polypeptide or polypeptide complex and a SARS-CoV-2 virus, virion or fragment thereof, and (iii) diagnosing the subject as not having COVID-19 or not suspected of having COVID-19 when the presence of the virus complex is not detected. In some aspects, the method is performed in vitro or ex vivo.

[1021] The term “sample,” as used herein, refers to a composition that is obtained or derived from a subject that contains a cellular and/or other molecular entity that is to be characterized and/or identified, for example, based on physical, biochemical, chemical, and/or physiological characteristics. A sample includes, but is not limited to, nasal fluid or discharge (e.g., from a nasal swab), tissue, primary or cultured cells or cell lines, cell supernatants, cell lysates, platelets, serum, plasma, vitreous fluid, lymph fluid, synovial fluid, follicular fluid, seminal fluid, amniotic fluid, milk, whole blood, blood-derived cells, urine, cerebro-spinal fluid, saliva, sputum, tears, perspiration, mucus, tumor lysates, tissue culture medium, tissue extracts such as homogenized tissue, cellular extracts, and combinations thereof.

[1022] Methods for collecting, processing and storing a sample are known, and described, for example, in Vaught et al., IARC Sci. Pub., Unit 2. Chapter 3, pp. 23-42, 2011; CDC Interim Guidelines for Collecting and Handling of Clinical Specimens for COVID-19 Testing, Oct. 25, 2021; and Minghetti et al., Recommendations for collection, transport and storage of COVID-19 biological samples, ISS working group on Translational Research COVID-19, Istituto Superiore di Sanita, Apr. 15, 2020.

[1023] Methods for detecting the binding of an antigen binding polypeptide or polypeptide complex (e.g., antibody or antigen binding fragment thereof) provided herein and a SARS-CoV-2 virus, virion or fragment thereof are also known. Such methods include, but are not limited to, immunosorbent assay (ELISA), immunospot assay, lateral flow assay, flow cytometry, immunohistochemistry or western blot. See, e.g., Kumar et al., VirusDisease, 31:97-105, 2020; Gong et al., Front. Mol. Biosci. Jul. 23, 2021; and Espejo et al., Am. J. Clin. Pathol., 154(3)293-304, 2020.

[1024] In some aspects, the disclosure provides a method of delivering an antigen binding polypeptide or antigen binding polypeptide complex provided herein. In some aspects, the method includes administering to a subject a pharmaceutical composition provided herein. In some aspects, the pharmaceutical composition comprises (1) one or more polynucleotides encoding an antigen binding polypeptide or antigen binding polypeptide complex provided herein, and (2) a lipid nanoparticle composition. In some aspects, the lipid nanoparticle composition comprises one or more of (i) a cationic and/or ionizable lipid, (ii) a structural lipid, (iii) a PEGylated lipid, and (iv) a phospholipid, as provided herein.

[1025] In some aspects, the disclosure provides a method of producing an antigen binding polypeptide or antigen binding polypeptide complex provided herein in a cell. In some aspects, the method includes administering to a subject a pharmaceutical composition provided herein. In some aspects, the pharmaceutical composition comprises (1) one or more polynucleotides encoding an antigen binding polypeptide or antigen binding polypeptide complex provided herein, and (2) a lipid nanoparticle composition. In some aspects, the lipid nanoparticle composition comprises one or more of (i) a cationic and/or ionizable lipid, (ii) a structural lipid, (iii) a PEGylated lipid, and (iv) a phospholipid, as provided herein.

[1026] In some aspects, the disclosure provides a method of treating a disease or disorder provided herein. In some aspects, the method includes administering to a subject a pharmaceutical composition provided herein. In some aspects, the pharmaceutical composition comprises (1) one or more polynucleotides encoding an antigen binding polypeptide or antigen binding polypeptide complex provided herein, and (2) a lipid nanoparticle composition. In some aspects, the lipid nanoparticle composition comprises one or more of (i) a cationic and/or ionizable lipid, (ii) a structural lipid, (iii) a PEGylated lipid, and (iv) a phospholipid, as provided herein.

[1027] In some aspects, the antigen binding polypeptide or polypeptide complex (e.g., an antibody or antigen binding fragment thereof) has greater neutralization potency against SARS-CoV-2 virus than a monospecific polypeptide, polypeptide complex, antibody or fragment that specifically binds to one of the same antigens.

[1028] In some aspects, the antigen binding polypeptide or polypeptide complex (e.g., an antibody or antigen binding fragment thereof) is bispecific, trispecific or tetraspecific and has greater neutralization potency against SARS-CoV-2 virus than a monospecific polypeptide, polypeptide complex, antibody or fragment that specifically binds to one of the same antigens the bispecific, trispecific or tetraspecific polypeptide or polypeptide complex.

[1029] In some aspects, the antigen binding polypeptide or polypeptide complex (e.g., an antibody or antigen binding fragment thereof) has greater neutralization potency against SARS-CoV-2 virus than a mixture of monospecific polypeptides, polypeptide complexes, antibodies or fragments that specifically bind to the same antigens.

[1030] In some aspects, the antigen binding polypeptide or polypeptide complex (e.g., an antibody or antigen binding fragment thereof) is bispecific, trispecific or tetraspecific and has greater neutralization potency against SARS-CoV-2 virus than a mixture of monospecific polypeptides, polypeptide complexes, antibodies or fragments that specifically bind to the same antigens as the bispecific, trispecific or tetraspecific polypeptide or polypeptide complex.

[1031] In some aspects, the antigen binding polypeptide complex (e.g., an antibody or antigen binding fragment thereof), polypeptide, polynucleotide, vector, host cell, or pharmaceutical composition provided herein neutralizes multiple SARS-CoV-2 variants. In some aspects, the antigen binding polypeptide complex (e.g., an antibody or antigen binding fragment thereof), polypeptide, polynucleotide, vector, host cell, or pharmaceutical composition provided herein neutralizes diverse SARS-CoV-2 variants. In some aspects, the antigen binding polypeptide complex (e.g., an antibody or antigen binding fragment thereof), polypeptide, polynucleotide, vector, host cell, or pharmaceutical composition provided herein provides broad coverage against SARS-CoV-2 variants.

[1032] In some aspects, the antigen binding polypeptide complex (e.g., an antibody or antigen binding fragment thereof), polypeptide, polynucleotide, vector, host cell, or pharmaceutical composition provided herein reduces viral load to no more than from about 1×10⁶ per gram of tissue (TCID50/g) to about 2×10⁶ per gram of tissue. In some aspects, the antigen binding polypeptide complex (e.g., an antibody or antigen binding fragment thereof), polypeptide, polynucleotide, vector, host cell, or pharmaceutical composition provided herein reduces viral load to no more than from about 1×10⁶ per gram of tissue to about 1.5×10⁶ per gram of tissue. In some aspects, the antigen binding polypeptide complex (e.g., an antibody or antigen binding fragment thereof), polypeptide, polynucleotide, vector, host cell, or pharmaceutical composition provided herein reduces viral load to no more than about 1.4×10⁶ per gram of tissue.

[1033] In some aspects, the SARS-CoV-2 of the SARS-CoV-2 protein to which an antigen binding polypeptide or polypeptide complex provided herein specifically binds is a variant of concern (VOC). In some aspects, the SARS-CoV-2 of the SARS-CoV-2 protein to which an antigen binding polypeptide or polypeptide complex provided herein specifically binds is a variant under monitoring (e.g., variant with genetic changes suspected to affect virus characteristics and some indication of posing a future risk, but further studies are needed).

[1034] In some aspects, the SARS-CoV-2 of the SARS-CoV-2 protein to which an antigen binding polypeptide or polypeptide complex provided herein specifically binds is a Lambda (C.37), Mu (B.1.621), Epsilon (B.1.429, B.1.427, CAL.20C), Zeta (P.2), Eta (B.1.525), Theta (P.3), Iota (B.1.526), or Kappa (B.1.617.1) variant, or a combination thereof. In some aspects, the SARS-CoV-2 of the SARS-CoV-2 protein to which an antigen binding polypeptide or polypeptide complex provided herein specifically binds is a AZ.5, C.1.2, B.1.617.1, B.1.526, B.1.525, B.1.630, B.1.640, AV.1, AT.1, R.1, B.1.466.2, B.1.1.519, C.36.3, B.1.214.2, B.1.427, B.1.429, B.1.1.523, B.1.619, B.1.620, B.1.1.207, B.1.1.317, B.1.616, B.1.618, or B.1.640.2 variant, or a combination thereof.

[1035] In some aspects, the SARS-CoV-2 of the SARS-CoV-2 protein to which an antigen binding polypeptide or polypeptide complex provided herein specifically binds is an Alpha (B.1.1.7), Beta (B.1.351), Gamma (P.1), Delta (B.1.617.2), or Omicron (B.1.1.529) variant, or a combination thereof. In some aspects, the Omicron variant is BA.1, BA.2, BA.2.12.1, BA, 4, BA.4/5, BA.5, BQ.1, BQ.1.1, BA.2.75, BA.2.75.2, BA.4.6, BQ.1.1, BJ.1, XBB, XBB1.5, BF.7, CH.1.1, or a combination thereof.

[1036] In some aspects, the SARS-CoV-2 protein has an amino acid mutation of one or more of the following: F2L, L5F, L51, V6F, L7V, P9L, S12C, S13I, Q14H, C15F, N17K, L18F, T20I, T22N, T22A, T22I, Q23K, P25S, A27S, A27V, T29I, F32L, R34C, H49Y, S50L, T51I, Q52L, Q52H, L54F, L54W, F55I, P57L, H69Y, S71F, G72V, T73I, G75V, T76I, F79L, D80N, D80Y, N87Y, D88N, D88E, D88Y, D88A, V90F, T95A, T95I, E96D, K97T, S98F, R1021, 1105L, D111N, K113R, L118F, V130A, E132D, C136R, D138H, L141-, L141F, G142V, G142-, V143F, V143-, Y144-, Y144V, Y145H, H146Y, K147E, N148S, S151I, W152C, M153T, M153V, M153I, E154V, F157L, R158S, L176F, M177I, D178N, G181V, L189F, R190K, I203M, I210-, R214L, D215Y, D215G, L216F, Q218L, F220L, S221L, A222V, A222P, D228H, L229F, Q239R, T240I, L242F, A243S, A243V, H245R, H245Y, R246K, D253Y, D253G, S254F, S256L, W258L, G261V, G261R, A262S, Y265C, V267L, R273S, E281Q, A288S, L293V, D294E, P295S, E298G, T307I, V308L, E309Q, Q314K, Q314L, Q314H, T315I, Q321L, T323I, P330S, A344S, T345S, A348T, A348S, N354K, R357K, V367F, V382L, P384L, V395I, R403K, V407I, A411S, G413R, K417T, N439K, N440K, L441I, G446V, R457K, K458Q, G476S, S477N, P479L, V483A, E484Q, E484K, Q493L, S494P, L452R, Y453F, Y508H, N501Y, H519Q, A520S, A522V, K529E, G545S, T547I, L552F, T553I, E554D, K558N, A570V, T572I, D574Y, E583D, I584V, S5961, 1598V, N603H, Q613H, D614G, V615F, T618A, P621S, V622F, V622I, V622A, A623S, H625Y, A626V, P631S, W633R, G639V, S640F, A647S, A647V, E654Z, E654K, H655Y, N658Y, A668S, A672V, Q675R, Q675H, T676S, T676I, Q677H, Q677R, T678I, P681L, P681R, P681H, R682W, A684S, A684T, V687L, A688V, A688S, S689I, S691F, S698L, N703D, S704L, V705F, A706V, I714M, T716I, I720V, T724A, M7311, T732A, T732I, G744V, D745G, N751D, L754F, R765S, R765H, T768I, G769A, A771S, T778I, Q779H, E780Q, A783S, D808V, D808G, P809S, I818V, L822F, D830H, D830Y, Q836P, Q836L, G838D, A845S, A845D, A845V, A845D, A845S, A846V, R847I, K854R, N856S, T859I, D867N, A879V, A879S, F888L, A893E, A893V, E918V, L922F, A924S, A924V, S929I, D936H, D936Y, L938F, S939F, T941I, G946V, A958S, N969S, L981F, T1006I, V1008T, T1009I, A1016S, A1020V, F1052L, P1053T, L1063F, V1065L, A1070V, Q1071H, E1072V, K1073N, A1078V, A1078S, G1085R, K1086N, R1091L, H1101Y, V1104L, P1112L, D1118Y, Ti 1201, V1122L, S1123P, G1124V, G1124C, V1129A, 11130M, T1136I, D1139H, L1141F, D1146H, S1147L, D1153Y, P1162Q, P1162S, P1162Q, P1162S, D1163Y, G1167V, D1168H, V1176F, N1187Y, K1191N, N1192T, E1195Q, L1203F, K1205N, E1207A, 1219 V, G1219S, I1221T, V1228L, M1229I, V1230L, T1231I, T1231A, C1235F, M1237I, M1237V, M1237T, T1238I, K1245N, C1247F, G1251R, D1259H, S1261F, P1263L, V1264L, a deletion of residues 69 and 70, a deletion of residues 246-252 and D253N, or a combination thereof.

[1037] In some aspects, provided herein is a method of preventing immune escape of a SARS-CoV2 virus in a subject infected with the SARS-CoV2 virus, comprising administering to the subject an effective amount of an antigen binding polypeptide or polypeptide complex provided herein, an antibody or antigen binding fragment thereof provided herein, a pharmaceutical composition provided herein, or a combination thereof. In some aspects, provided herein is an antigen binding polypeptide, antigen binding polypeptide complex (e.g., antibody or antigen binding fragment thereof), polypeptide, polynucleotide, vector, cell, or pharmaceutical composition described herein, or a combination thereof, for use in preventing immune escape of a SARS-CoV-2 variant in a subject in need theref. In some aspects, provided herein is the use of an antigen binding polypeptide, antigen binding polypeptide complex (e.g., antibody or antigen binding fragment thereof), polypeptide, polynucleotide, vector, cell, or pharmaceutical composition described herein, or a combination thereof in the manufacture of a medicament for preventing immune escape of a SARS-CoV-2 variant in a subject in need thereof. In some aspects, provided herein is an antigen binding polypeptide, antigen binding polypeptide complex (e.g., antibody or antigen binding fragment thereof), polypeptide, polynucleotide, vector, cell, or pharmaceutical composition described herein, or a combination thereof, for use in treating or preventing infection with a SARS-CoV-2 variant in a subject in need thereof, wherein the antigen binding polypeptide complex (e.g., antibody or antigen binding fragment thereof), polypeptide, polynucleotide, vector, cell, pharmaceutical composition or combination thereof prevents immune escape of the SARS-CoV-2 variant in the subject. In some aspects, provided herein is the use of an antigen binding polypeptide, antigen binding polypeptide complex (e.g., antibody or antigen binding fragment thereof), polypeptide, polynucleotide, vector, cell, or pharmaceutical composition described herein, or a combination thereof in the manufacture of a medicament for treating or preventing infection with a SARS-CoV-2 variant in a subject in need thereof, wherein the antigen binding polypeptide complex (e.g., antibody or antigen binding fragment thereof), polypeptide, polynucleotide, vector, cell, pharmaceutical composition or combination thereof prevents immune escape of the SARS-CoV-2 variant in the subject. In some aspects, preventing immune escape of a SARS-CoV-2 variant comprises administering a pharmaceutical composition comprising (1) one or more polynucleotides encoding an antigen binding polypeptide or antigen binding polypepetide complex provided herein, and (2) a lipid nanoparticle composition. In some aspects, the lipid nanoparticle composition comprises one or more of (i) a cationic and/or ionizable lipid, (ii) a structural lipid, (iii) a PEGylated lipid, and (iv) a phospholipid, as provided herein.

[1038] In some aspects, provided herein is a method of preventing immune escape of a SARS-CoV2 virus in a subject infected with the SARS-CoV2 virus, comprising administering to the subject an effective amount of an anti-SARS-CoV2 multivalent antibody that exhibits improved prevention of immune escape compared to (i) a monovalent anti-SARS-CoV2 antibody that binds to one of the same antigens as the anti-SARS-CoV2 multivalent antibody, and/or (ii) a combination of monovalent anti-SARS-CoV2 antibodies that binds to the same antigens as the anti-SARS-CoV2 multivalent antibody. In some aspects, provided herein is an anti-SARS-CoV2 multivalent antibody for use in a method of preventing immune escape of a SARS-CoV2 virus in a subject infected with the SARS-CoV2 virus, wherein the anti-SARS-CoV2 multivalent antibody exhibits improved prevention of immune escape compared to (i) a monovalent anti-SARS-CoV2 antibody that binds to one of the same antigens as the anti-SARS-CoV2 multivalent antibody, and/or (ii) a combination of monovalent anti-SARS-CoV2 antibodies that binds to the same antigens as the anti-SARS-CoV2 multivalent antibody. In some aspects, provided herein is the use of an anti-SARS-CoV2 multivalent antibody in the manufacture of a medicament for preventing immune escape of a SARS-CoV2 virus in a subject infected with the SARS-CoV2 virus, wherein the anti-SARS-CoV2 multivalent antibody exhibits improved prevention of immune escape compared to (i) a monovalent anti-SARS-CoV2 antibody that binds to one of the same antigens as the anti-SARS-CoV2 multivalent antibody, and/or (ii) a combination of monovalent anti-SARS-CoV2 antibodies that binds to the same antigens as the anti-SARS-CoV2 multivalent antibody. In some aspects, provided herein is an anti-SARS-CoV2 multivalent antibody for use in preventing or treating a SARS-CoV-2 virus infection in a subject in need thereof, wherein the anti-SARS-CoV2 multivalent antibody prevents immune escape of the SARS-CoV-2 virus in the subject, and wherein the anti-SARS-CoV2 multivalent antibody exhibits improved prevention of immune escape compared to (i) a monovalent anti-SARS-CoV2 antibody that binds to one of the same antigens as the anti-SARS-CoV2 multivalent antibody, and/or (ii) a combination of monovalent anti-SARS-CoV2 antibodies that binds to the same antigens as the anti-SARS-CoV2 multivalent antibody. In some aspects, provided herein is the use of an anti-SARS-CoV2 multivalent antibody in the manufacture of a medicament for preventing or treating a SARS-CoV-2 virus infection in a subject in need thereof, wherein the anti-SARS-CoV2 multivalent antibody prevents immune escape of the SARS-CoV-2 virus in the subject, and wherein the anti-SARS-CoV2 multivalent antibody exhibits improved prevention of immune escape compared to (i) a monovalent anti-SARS-CoV2 antibody that binds to one of the same antigens as the anti-SARS-CoV2 multivalent antibody, and/or (ii) a combination of monovalent anti-SARS-CoV2 antibodies that binds to the same antigens as the anti-SARS-CoV2 multivalent antibody.

[1039] In some aspects, provided herein is a method of neutralizing a SARS-CoV-2 variant, comprising administering an antigen binding polypeptide complex (e.g., an antibody or antigen binding fragment thereof), polypeptide, polynucleotide, vector, host cell or pharmaceutical composition provided herein, or a combination thereof. In some aspects, provided herein is a method of neutralizing a SARS-CoV-2 variant in a subject in need thereof, comprising administering to the subject an effective amount of an antigen binding polypeptide complex (e.g., an antibody or antigen binding fragment thereof), polypeptide, polynucleotide, vector, host cell or pharmaceutical composition provided herein, or a combination thereof. In some aspects, multiple SARS-CoV-2 variants are neutralized. In some aspects, diverse SARS-CoV-2 variants are neutralized. In some aspects, provided herein is an antigen binding polypeptide complex (e.g., antibody or antigen binding fragment thereof), polypeptide, polynucleotide, vector, cell, or pharmaceutical composition described herein, or a combination thereof, for use in a method of neutralizing a SARS-CoV-2 variant in a subject in need thereof. In some aspects, provided herein is the use of an antigen binding polypeptide complex (e.g., antibody or antigen binding fragment thereof), polypeptide, polynucleotide, vector, cell, or pharmaceutical composition described herein, or a combination thereof in the manufacture of a medicament for neutralizing a SARS-CoV-2 variant in a subject in need thereof. In some aspects, provided herein is an antigen binding polypeptide complex (e.g., antibody or antigen binding fragment thereof), polypeptide, polynucleotide, vector, cell, or pharmaceutical composition described herein, or a combination thereof, for use in preventing or treating infection with a SARS-CoV-2 variant in a subject in need thereof, wherein the antigen binding polypeptide complex (e.g., antibody or antigen binding fragment thereof), polypeptide, polynucleotide, vector, cell, pharmaceutical composition or combination thereof neutralizes the SARS-CoV-2 variant in the subject. In some aspects, provided herein is the use of an antigen binding polypeptide complex (e.g., antibody or antigen binding fragment thereof), polypeptide, polynucleotide, vector, cell, or pharmaceutical composition described herein, or a combination thereof in the manufacture of a medicament for treating or preventing infection with a SARS-CoV-2 variant in a subject in need thereof, wherein the antigen binding polypeptide complex (e.g., antibody or antigen binding fragment thereof), polypeptide, polynucleotide, vector, cell, pharmaceutical composition or combination thereof neutralizes the SARS-CoV-2 variant in the subject. In some aspects, treating or preventing a SARS-CoV-2 infection by neutralizing a SARS-CoV-2 variant comprises administering a pharmaceutical composition comprising (1) one or more polynucleotides encoding an antigen binding polypeptide or antigen binding polypepetide complex provided herein, and (2) a lipid nanoparticle composition. In some aspects, the lipid nanoparticle composition comprises one or more of (i) a cationic and/or ionizable lipid, (ii) a structural lipid, (iii) a PEGylated lipid, and (iv) a phospholipid, as provided herein.

[1040] In some aspects, provided herein is a method of increasing neutralization potency against a SARS-CoV-2 virus in a subject infected with the SARS-CoV2 virus, comprising administering to the subject an effective amount of an antigen binding polypeptide or polypeptide complex provided herein, an antibody or antigen binding fragment thereof provided herein, or a combination thereof. In some aspects, provided herein is an antigen binding polypeptide, antigen binding polypeptide complex (e.g., antibody or antigen binding fragment thereof), polypeptide, polynucleotide, vector, cell, or pharmaceutical composition described herein, or a combination thereof, for use in a method of increasing neutralization potency against a SARS-CoV-2 variant in a subject in need thereof. In some aspects, provided herein is the use of an antigen binding polypeptide, antigen binding polypeptide complex (e.g., antibody or antigen binding fragment thereof), polypeptide, polynucleotide, vector, cell, or pharmaceutical composition described herein, or a combination thereof in the manufacture of a medicament for increasing neutralization potency against a SARS-CoV-2 variant in a subject in need thereof. In some aspects, provided herein is an antigen binding polypeptide, antigen binding polypeptide complex (e.g., antibody or antigen binding fragment thereof), polypeptide, polynucleotide, vector, cell, or pharmaceutical composition described herein, or a combination thereof, for use in treating or preventing infection with a SARS-CoV-2 variant in a subject in need thereof, wherein the antigen binding polypeptide complex (e.g., antibody or antigen binding fragment thereof), polypeptide, polynucleotide, vector, cell, pharmaceutical composition or combination thereof increases neutralization potency against the SARS-CoV-2 variant in the subject. In some aspects, provided herein is the use of an antigen binding polypeptide, antigen binding polypeptide complex (e.g., antibody or antigen binding fragment thereof), polypeptide, polynucleotide, vector, cell, or pharmaceutical composition described herein, or a combination thereof in the manufacture of a medicament for treating or preventing infection with a SARS-CoV-2 variant in a subject in need thereof, wherein the antigen binding polypeptide complex (e.g., antibody or antigen binding fragment thereof), polypeptide, polynucleotide, vector, cell, pharmaceutical composition or combination thereof increases neutralization potency against the SARS-CoV-2 variant in the subject. In some aspects, increasing neutralization potency against a SARS-CoV-2 variant comprises administering a pharmaceutical composition comprising (1) one or more polynucleotides encoding an antigen binding polypeptide or antigen binding polypepetide complex provided herein, and (2) a lipid nanoparticle composition. In some aspects, the lipid nanoparticle composition comprises one or more of (i) a cationic and/or ionizable lipid, (ii) a structural lipid, (iii) a PEGylated lipid, and (iv) a phospholipid, as provided herein.

[1041] In some aspects, provided herein is a method of increasing neutralization potency against a SARS-CoV-2 virus in a subject infected with the SARS-CoV2 virus, comprising administering to the subject an effective amount of an anti-SARS-CoV2 multivalent antibody that exhibits increased neutralization potency compared to (i) a monovalent anti-SARS-CoV2 antibody that binds to one of the same antigens as the anti-SARS-CoV2 multivalent antibody and/or (ii) a combination of monovalent anti-SARS-CoV2 antibodies that binds to the same antigens as the anti-SARS-CoV2 multivalent antibody. In some aspects, provided herein is an anti-SARS-CoV2 multivalent antibody for use in a method of increasing neutralization potency against a SARS-CoV-2 virus in a subject infected with the SARS-CoV2 virus, wherein the anti-SARS-CoV2 multivalent antibody exhibits increased neutralization potency compared to (i) a monovalent anti-SARS-CoV2 antibody that binds to one of the same antigens as the anti-SARS-CoV2 multivalent antibody and/or (ii) a combination of monovalent anti-SARS-CoV2 antibodies that binds to the same antigens as the anti-SARS-CoV2 multivalent antibody. In some aspects, provided herein is the use of an anti-SARS-CoV2 multivalent antibody in the manufacture of a medicament for increasing neutralization potency against a SARS-CoV-2 virus in a subject infected with the SARS-CoV2 virus, wherein the anti-SARS-CoV2 multivalent antibody exhibits increased neutralization potency compared to (i) a monovalent anti-SARS-CoV2 antibody that binds to one of the same antigens as the anti-SARS-CoV2 multivalent antibody and/or (ii) a combination of monovalent anti-SARS-CoV2 antibodies that binds to the same antigens as the anti-SARS-CoV2 multivalent antibody. In some aspects, provided herein is an anti-SARS-CoV2 multivalent antibody for use in preventing or treating a SARS-CoV-2 virus infection in a subject in need thereof, wherein the anti-SARS-CoV2 multivalent antibody increases neutralization potency against the SARS-CoV-2 virus in the subject, and wherein the anti-SARS-CoV2 multivalent antibody exhibits increased neutralization potency compared to (i) a monovalent anti-SARS-CoV2 antibody that binds to one of the same antigens as the anti-SARS-CoV2 multivalent antibody and/or (ii) a combination of monovalent anti-SARS-CoV2 antibodies that binds to the same antigens as the anti-SARS-CoV2 multivalent antibody. In some aspects, provided herein is the use of an anti-SARS-CoV2 multivalent antibody in the manufacture of a medicament for preventing or treating a SARS-CoV-2 virus infection in a subject in need thereof, wherein the anti-SARS-CoV2 multivalent antibody increases neutralization potency against the SARS-CoV-2 virus in the subject, and wherein the anti-SARS-CoV2 multivalent antibody exhibits increased neutralization potency compared to (i) a monovalent anti-SARS-CoV2 antibody that binds to one of the same antigens as the anti-SARS-CoV2 multivalent antibody and/or (ii) a combination of monovalent anti-SARS-CoV2 antibodies that binds to the same antigens as the anti-SARS-CoV2 multivalent antibody.

[1042] In some aspects, the anti-SARS-CoV2 multivalent antibody is administered in a pharmaceutical composition. In some aspects, the pharmaceutical composition further comprises a pharmaceutically acceptable carrier.

[1043] In some aspects, the anti-SARS-CoV2 multivalent antibody exhibits improved prevention of immune escape compared to a monovalent anti-SARS-CoV2 antibody that binds to one of the same antigens as the anti-SARS-CoV2 multivalent antibody.

[1044] In some aspects, the anti-SARS-CoV2 multivalent antibody exhibits increased neutralization potency compared to a combination of monovalent anti-SARS-CoV2 antibodies that binds to the same antigens as the anti-SARS-CoV2 multivalent antibody.

[1045] In some aspects, the anti-SARS-CoV2 multispecific antibody prevents immune escape of the anti-SARS-CoV2 multivalent antibody for at least 2, at least 3, at least 4, at least 5, at least 6, or at least 7 selection rounds as measured by an antibody escape assay. In some aspects, the anti-SARS-CoV2 multispecific antibody prevents immune escape of the anti-SARS-CoV2 multivalent antibody for about 2 to about 7 selection rounds as measured by an antibody escape assay, or any value or range of values therein, for example, for about 3 to about 7 selection rounds, about 4 to about 7 selection rounds, about 5 to about 7 selection rounds, about 6 to about 7 selection rounds, about 2 to about 6 selection rounds, about 3 to about 6 selection rounds, about 4 to about 6 selection rounds, about 5 to about 6 selection rounds, about 2 to about 5 selection rounds, about 3 to about 5 selection rounds, about 4 to about 5 selection rounds, about 2 to about 4 selection rounds, about 3 to about 4 selection rounds, or about 2 to about 3 selection rounds as measured by an antibody escape assay. In some aspects, the anti-SARS-CoV2 multispecific antibody prevents immune escape of the anti-SARS-CoV2 multivalent antibody for about 2, about 3, about 4, about 5, about 6 or about 7 selection rounds as measured by an antibody escape assay.

[1046] In some aspects, the anti-SARS-CoV2 multispecific antibody prevents immune escape of the anti-SARS-CoV2 multivalent antibody following at least 2, at least 3, at least 4, at least 5, at least 6, or at least 7 exposures to the subject by the SARS-CoV2 virus. In some aspects, the anti-SARS-CoV2 multispecific antibody prevents immune escape of the anti-SARS-CoV2 multivalent antibody following about 2 to about 7 exposures to the subject by the SARS-CoV2 virus, or any value or range of values therein, for example, for about 3 to about 7 exposures, about 4 to about 7 exposures, about 5 to about 7 exposures, about 6 to about 7 exposures, about 2 to about 6 exposures, about 3 to about 6 exposures, about 4 to about 6 exposures, about 5 to about 6 exposures, about 2 to about 5 exposures, about 3 to about 5 exposures, about 4 to about 5 exposures, about 2 to about 4 exposures, about 3 to about 4 exposures, or about 2 to about 3 exposures to the subject by the SARS-CoV2 virus. In some aspects, the anti-SARS-CoV2 multispecific antibody prevents immune escape of the anti-SARS-CoV2 multivalent antibody following about 2, about 3, about 4, about 5, about 6 or about 7 exposures to the subject by the SARS-CoV2 virus.

[1047] In some aspects, the anti-SARS-CoV2 multispecific antibody is at least 100-fold, at least 500-fold, at least 1,000-fold, or at least 2,000-fold more effective in inhibiting growth of the SARS-CoV2 virus compared to (i) a monovalent anti-SARS-CoV2 antibody that binds to one of the same antigens as the anti-SARS-CoV2 multivalent antibody and/or (ii) a combination of monovalent anti-SARS-CoV2 antibodies that binds to the same antigens as the anti-SARS-CoV2 multivalent antibody. In some aspects, the anti-SARS-CoV2 multispecific antibody is from about 100-fold to about 2,000-fold more effective in inhibiting growth of the SARS-CoV2 virus compared to (i) a monovalent anti-SARS-CoV2 antibody that binds to one of the same antigens as the anti-SARS-CoV2 multivalent antibody and/or (ii) a combination of monovalent anti-SARS-CoV2 antibodies that binds to the same antigens as the anti-SARS-CoV2 multivalent antibody, or any value or range of values therein, for example, from about 500-fold to about 2,000-fold, about 1,000-fold to about 2,000-fold, about 100-fold to about 1,000-fold, about 500-fold to about 1,000-fold, or about 100-fold to about 500-fold. In some aspects, the anti-SARS-CoV2 multispecific antibody is about 100-fold, about 500-fold, about 1,000-fold, or about 2,000-fold more effective in inhibiting growth of the SARS-CoV2 virus compared to (i) a monovalent anti-SARS-CoV2 antibody that binds to one of the same antigens as the anti-SARS-CoV2 multivalent antibody and/or (ii) a combination of monovalent anti-SARS-CoV2 antibodies that binds to the same antigens as the anti-SARS-CoV2 multivalent antibody. In some aspects, the anti-SARS-CoV2 multivalent antibody comprises a first antigen binding site that specifically binds to a SARS-CoV-2 protein and a second antigen binding site that specifically binds to a SARS-CoV-2 protein.

[1048] In some aspects, the first antigen binding site is different than the second antigen binding site.

[1049] In some aspects, the first antigen binding site comprises a first heavy chain variable domain and a first light chain variable domain, and the second antigen binding site comprises a second heavy chain variable domain and a second light chain variable domain.

[1050] In some aspects, the first and second heavy chain variable regions each comprise CDR1, CDR2 and CDR3 regions, and the first and second light chain variable region each comprise CDR1, CDR2 and CDR3 regions.

[1051] In some aspects, the CDR1 of the first heavy chain variable region comprises an amino acid sequence having at least 80%, at least 85%, at least 90%, at least 91%, at least 92%, at least 93%, at least 94%, at least 95%, at least 96%, at least 97%, at least 98%, at least 99% or 100% identity to any one of SEQ ID NOs:43, 51, 59, 67, 75, 171, 179, 187, 264, 272, 280, 288, 513, 521, 529, 537, 545, 553, 561, 569, 577, 585, 593, 601, 609, 617, 639, 647, 656 and 664; the CDR2 of the first heavy chain variable region comprises an amino acid sequence having at least 80%, at least 85%, at least 90%, at least 91%, at least 92%, at least 93%, at least 94%, at least 95%, at least 96%, at least 97%, at least 98%, at least 99% or 100% identity to any one of SEQ ID NOs:44, 52, 60, 68, 76, 172, 180, 188, 265, 273, 281, 289, 514, 522, 530, 538, 546, 554, 562, 570, 578, 586, 594, 602, 610, 618, 640, 648, 657 and 665; the CDR3 of the first heavy chain variable region comprises an amino acid sequence having at least 80%, at least 85%, at least 90%, at least 91%, at least 92%, at least 93%, at least 94%, at least 95%, at least 96%, at least 97%, at least 98%, at least 99% or 100% identity to any one of SEQ ID NOs:45, 53, 61, 69, 77, 173, 181, 189, 266, 274, 282, 290, 515, 523, 531, 539, 547, 555, 563, 571, 579, 587, 595, 603, 611, 619, 641, 649, 658 and 666; the CDR1 of the first light chain variable region comprises an amino acid sequence having at least 80%, at least 85%, at least 90%, at least 91%, at least 92%, at least 93%, at least 94%, at least 95%, at least 96%, at least 97%, at least 98%, at least 99% or 100% identity to any one of SEQ ID NOs:39, 47, 55, 63, 71, 167, 175, 183, 260, 268, 276, 284, 517, 525, 533, 541, 549, 557, 565, 573, 581, 589, 597, 605, 613, 621, 643, 651, 660 and 668; the CDR2 of the first light chain variable region comprises an amino acid sequence having at least 80%, at least 85%, at least 90%, at least 91%, at least 92%, at least 93%, at least 94%, at least 95%, at least 96%, at least 97%, at least 98%, at least 99% or 100% identity to any one of SEQ ID NOs:40, 48, 56, 64, 72, 168, 176, 184, 261, 269, 277 (having the sequence of LGS), 285, 518 (having the sequence of DAS), 526 (having the sequence of DVS), 534 (having the sequence of EDS), 542 (having the sequence of KDS), 550 (having the sequence of DAS), 558 (having the sequence of AAS), 566 (having the sequence of GAS), 574 (having the sequence of DDS), 582 (having the sequence of KDS), 590 (having the sequence of SAS), 598 (having the sequence of SAS), 606 (having the sequence of GAS), 614 (having the sequence of GAS), 622 (having the sequence of GAS), 644 (having the sequence of GAS), 652 (having the sequence of SAS), 661 (having the sequence of GAS) and 669 (having the sequence of DAS); the CDR3 of the first light chain variable region comprises an amino acid sequence having at least 80%, at least 85%, at least 90%, at least 91%, at least 92%, at least 93%, at least 94%, at least 95%, at least 96%, at least 97%, at least 98%, at least 99% or 100% identity to any one of SEQ ID NOs:41, 49, 57, 65, 73, 169, 177, 185, 262, 270, 278, 286, 519, 527, 535, 543, 551, 559, 567, 575, 583, 591, 599, 607, 615, 623, 645, 653, 662 and 670; the CDR1 of the second heavy chain variable region comprises an amino acid sequence having at least 80%, at least 85%, at least 90%, at least 91%, at least 92%, at least 93%, at least 94%, at least 95%, at least 96%, at least 97%, at least 98%, at least 99% or 100% identity to any one of SEQ ID NOs:43, 51, 59, 67, 75, 171, 179, 187, 264, 272, 280, 288, 513, 521, 529, 537, 545, 553, 561, 569, 577, 585, 593, 601, 609, 617, 639, 647, 656 and 664; the CDR2 of the second heavy chain variable region comprises an amino acid sequence having at least 80%, at least 85%, at least 90%, at least 91%, at least 92%, at least 93%, at least 94%, at least 95%, at least 96%, at least 97%, at least 98%, at least 99% or 100% identity to any one of SEQ ID NOs:44, 52, 60, 68, 76, 172, 180, 188, 265, 273, 281, 289, 514, 522, 530, 538, 546, 554, 562, 570, 578, 586, 594, 602, 610, 618, 640, 648, 657 and 665; the CDR3 of the second heavy chain variable region comprises an amino acid sequence having at least 80%, at least 85%, at least 90%, at least 91%, at least 92%, at least 93%, at least 94%, at least 95%, at least 96%, at least 97%, at least 98%, at least 99% or 100% identity to any one of SEQ ID NOs:45, 53, 61, 69, 77, 173, 181, 189, 266, 274, 282, 290, 515, 523, 531, 539, 547, 555, 563, 571, 579, 587, 595, 603, 611, 619, 641, 649, 658 and 666; the CDR1 of the second light chain variable region comprises an amino acid sequence having at least 80%, at least 85%, at least 90%, at least 91%, at least 92%, at least 93%, at least 94%, at least 95%, at least 96%, at least 97%, at least 98%, at least 99% or 100% identity to any one of SEQ ID NOs:39, 47, 55, 63, 71, 167, 175, 183, 260, 268, 276, 284, 517, 525, 533, 541, 549, 557, 565, 573, 581, 589, 597, 605, 613, 621, 643, 651, 660 and 668; the CDR2 of the second light chain variable region comprises an amino acid sequence having at least 80%, at least 85%, at least 90%, at least 91%, at least 92%, at least 93%, at least 94%, at least 95%, at least 96%, at least 97%, at least 98%, at least 99% or 100% identity to any one of SEQ ID NOs:40, 48, 56, 64, 72, 168, 176, 184, 261, 269, 277 (having the sequence of LGS), 285, 518 (having the sequence of DAS), 526 (having the sequence of DVS), 534 (having the sequence of EDS), 542 (having the sequence of KDS), 550 (having the sequence of DAS), 558 (having the sequence of AAS), 566 (having the sequence of GAS), 574 (having the sequence of DDS), 582 (having the sequence of KDS), 590 (having the sequence of SAS), 598 (having the sequence of SAS), 606 (having the sequence of GAS), 614 (having the sequence of GAS), 622 (having the sequence of GAS), 644 (having the sequence of GAS), 652 (having the sequence of SAS), 661 (having the sequence of GAS) and 669 (having the sequence of DAS); and the CDR3 of the second light chain variable region comprises an amino acid sequence having at least 80%, at least 85%, at least 90%, at least 91%, at least 92%, at least 93%, at least 94%, at least 95%, at least 96%, at least 97%, at least 98%, at least 99% or 100% identity to any one of SEQ ID NOs:41, 49, 57, 65, 73, 169, 177, 185, 262, 270, 278, 286, 519, 527, 535, 543, 551, 559, 567, 575, 583, 591, 599, 607, 615, 623, 645, 653, 662 and 670. In some preferred aspects, CDR1, CDR2 and CDR3 of each of the first heavy chain variable region, the second heavy chain variable region, the first light chain variable region and the second light chain variable region have at least 90% identity with the corresponding amino acid sequences specified above. As used herein, “at least 90% identity” includes at least 91%, 92%, 93%, 94%, 95%, 96%, 97%, 98%, 99% and 100% identity to the recited reference sequence. In some particularly preferred aspects, CDR1, CDR2 and CDR3 of each of the first heavy chain variable region, the second heavy chain variable region, the first light chain variable region and the second light chain variable region comprise or consist of the corresponding amino acid sequences specified above.

[1052] In some aspects, the first heavy chain variable domain comprises an amino acid sequence having at least 80%, at least 85%, at least 90%, at least 91%, at least 92%, at least 93%, at least 94%, at least 95%, at least 96%, at least 97%, at least 98%, or 100% identity to any one of SEQ ID NOs:42, 50, 58, 66, 74, 170, 178, 186, 263, 271, 279, 287, 510, 512, 520, 528, 536, 544, 552, 560, 568, 576, 584, 592, 600, 608, 616, 624, 626, 628, 630, 632, 634, 636, 638, 646, 654, 663, 779, 781, 785 and 787; the first light chain variable domain comprises an amino acid sequence having at least 80%, at least 85%, at least 90%, at least 91%, at least 92%, at least 93%, at least 94%, at least 95%, at least 96%, at least 97%, at least 98%, or 100% identity to any one of SEQ ID NOs:38, 46, 54, 62, 70, 166, 174, 182, 259, 267, 275, 283, 508, 509, 511, 516, 524, 532, 540, 548, 556, 564, 572, 580, 588, 596, 604, 612, 620, 625, 627, 629, 631, 633, 635, 637, 642, 650, 659 and 667; the second heavy chain variable domain comprises an amino acid sequence having at least 80%, at least 85%, at least 90%, at least 91%, at least 92%, at least 93%, at least 94%, at least 95%, at least 96%, at least 97%, at least 98%, or 100% identity to any one of SEQ ID NOs:42, 50, 58, 66, 74, 170, 178, 186, 263, 271, 279, 287, 510, 512, 520, 528, 536, 544, 552, 560, 568, 576, 584, 592, 600, 608, 616, 624, 626, 628, 630, 632, 634, 636, 638, 646, 654, 663, 779, 781, 785 and 787; and the second light chain variable domain comprises an amino acid sequence having at least 80%, at least 85%, at least 90%, at least 91%, at least 92%, at least 93%, at least 94%, at least 95%, at least 96%, at least 97%, at least 98%, or 100% identity to any one of SEQ ID NOs:38, 46, 54, 62, 70, 166, 174, 182, 259, 267, 275, 283, 508, 509, 511, 516, 524, 532, 540, 548, 556, 564, 572, 580, 588, 596, 604, 612, 620, 625, 627, 629, 631, 633, 635, 637, 642, 650, 659 and 667. In some aspects, the sequence has a mutation at N62, for example, N62Q or N62Q at, for example, SEQ ID NO:279. In some preferred aspects, the first heavy chain variable region, the second heavy chain variable region, the first light chain variable region and the second light chain variable region have at least 90% identity with the corresponding amino acid sequences specified above, optionally a mutation at N62 as recited above. As used herein, “at least 90% identity” includes at least 91%, 92%, 93%, 94%, 95%, 96%, 97%, 98%, 99% and 100% identity to the recited reference sequence. In some particularly preferred aspects, the first heavy chain variable region, the second heavy chain variable region, the first light chain variable region and the second light chain variable region comprise or consist of the corresponding amino acid sequences specified above, optionally with a mutation at N62 as specified above.

[1053] In some aspects, the anti-SARS-CoV2 multivalent antibody further comprises a third antigen binding domain.

[1054] In some aspects, the third antigen binding site is different than the first antigen binding site, the second antigen binding site, or both the first and second antigen binding sites.

[1055] In some aspects, the third antigen binding site comprises a third heavy chain variable domain and a third light chain variable domain.

[1056] In some aspects, the third heavy chain variable domain comprises an amino acid sequence having at least 80%, at least 85%, at least 90%, at least 91%, at least 92%, at least 93%, at least 94%, at least 95%, at least 96%, at least 97%, at least 98%, or 100% identity to any one of SEQ ID NOs:42, 50, 58, 66, 74, 170, 178, 186, 263, 271, 279, 287, 510, 512, 520, 528, 536, 544, 552, 560, 568, 576, 584, 592, 600, 608, 616, 624, 626, 628, 630, 632, 634, 636, 638, 646, 654, 663, 779, 781, 785 and 787; and the third light chain variable domain comprises an amino acid sequence having at least 80%, at least 85%, at least 90%, at least 91%, at least 92%, at least 93%, at least 94%, at least 95%, at least 96%, at least 97%, at least 98%, or 100% identity to any one of SEQ ID NOs:38, 46, 54, 62, 70, 166, 174, 182, 259, 267, 275, 283, 508, 509, 511, 516, 524, 532, 540, 548, 556, 564, 572, 580, 588, 596, 604, 612, 620, 625, 627, 629, 631, 633, 635, 637, 642, 650, 659 and 667. In some aspects, the sequence has a mutation at N62, for example, N62Q or N62Q at, for example, SEQ ID NO:279. In some preferred aspects, the third heavy chain variable region has at least 90% identity with the corresponding amino acid sequences specified above, optionally with a mutation at N62 as specified above. As used herein, “at least 90% identity” includes at least 91%, 92%, 93%, 94%, 95%, 96%, 97%, 98%, 99% and 100% identity to the recited reference sequence. In some particularly preferred aspects, the third heavy chain variable region comprises or consists of the corresponding amino acid sequences specified above, optionally with a mutation at N62 as specified above.

[1057] In some aspects, the third heavy chain variable region comprises CDR1, CDR2 and CDR3 regions.

[1058] In some aspects, the CDR1 of the third heavy chain variable region comprises an amino acid sequence having at least 80%, at least 85%, at least 90%, at least 91%, at least 92%, at least 93%, at least 94%, at least 95%, at least 96%, at least 97%, at least 98%, at least 99% or 100% identity to any one of SEQ ID NOs:43, 51, 59, 67, 75, 171, 179, 187, 264, 272, 280, 288, 513, 521, 529, 537, 545, 553, 561, 569, 577, 585, 593, 601, 609, 617, 639, 647, 656 and 664; the CDR2 of the third heavy chain variable region comprises an amino acid sequence having at least 80%, at least 85%, at least 90%, at least 91%, at least 92%, at least 93%, at least 94%, at least 95%, at least 96%, at least 97%, at least 98%, at least 99% or 100% identity to any one of SEQ ID NOs:44, 52, 60, 68, 76, 172, 180, 188, 265, 273, 281, 289, 514, 522, 530, 538, 546, 554, 562, 570, 578, 586, 594, 602, 610, 618, 640, 648, 657 and 665; the CDR3 of the third heavy chain variable region comprises an amino acid sequence having at least 80%, at least 85%, at least 90%, at least 91%, at least 92%, at least 93%, at least 94%, at least 95%, at least 96%, at least 97%, at least 98%, at least 99% or 100% identity to any one of SEQ ID NOs:45, 53, 61, 69, 77, 173, 181, 189, 266, 274, 282, 290, 515, 523, 531, 539, 547, 555, 563, 571, 579, 587, 595, 603, 611, 619, 641, 649, 658 and 666; the CDR1 of the third light chain variable region comprises an amino acid sequence having at least 80%, at least 85%, at least 90%, at least 91%, at least 92%, at least 93%, at least 94%, at least 95%, at least 96%, at least 97%, at least 98%, at least 99% or 100% identity to any one of SEQ ID NOs:39, 47, 55, 63, 71, 167, 175, 183, 260, 268, 276, 284, 517, 525, 533, 541, 549, 557, 565, 573, 581, 589, 597, 605, 613, 621, 643, 651, 660 and 668; the CDR2 of the third light chain variable region comprises an amino acid sequence having at least 80%, at least 85%, at least 90%, at least 91%, at least 92%, at least 93%, at least 94%, at least 95%, at least 96%, at least 97%, at least 98%, at least 99% or 100% identity to any one of SEQ ID NOs:40, 48, 56, 64, 72, 168, 176, 184, 261, 269, 277 (having the sequence of LGS), 285, 518 (having the sequence of DAS), 526 (having the sequence of DVS), 534 (having the sequence of EDS), 542 (having the sequence of KDS), 550 (having the sequence of DAS), 558 (having the sequence of AAS), 566 (having the sequence of GAS), 574 (having the sequence of DDS), 582 (having the sequence of KDS), 590 (having the sequence of SAS), 598 (having the sequence of SAS), 606 (having the sequence of GAS), 614 (having the sequence of GAS), 622 (having the sequence of GAS), 644 (having the sequence of GAS), 652 (having the sequence of SAS), 661 (having the sequence of GAS) and 669 (having the sequence of DAS); and the CDR3 of the third light chain variable region comprises an amino acid sequence having at least 80%, at least 85%, at least 90%, at least 91%, at least 92%, at least 93%, at least 94%, at least 95%, at least 96%, at least 97%, at least 98%, at least 99% or 100% identity to any one of SEQ ID NOs:41, 49, 57, 65, 73, 169, 177, 185, 262, 270, 278, 286, 519, 527, 535, 543, 551, 559, 567, 575, 583, 591, 599, 607, 615, 623, 645, 653, 662 and 670. In some preferred aspects, CDR1, CDR2 and CDR3 of the third heavy chain variable region and the third light chain variable region have at least 90% identity with the corresponding amino acid sequences specified above. As used herein, “at least 90% identity” includes at least 91%, 92%, 93%, 94%, 95%, 96%, 97%, 98%, 99% and 100% identity to the recited reference sequence. In some particularly preferred aspects, CDR1, CDR2 and CDR3 of each of third heavy chain variable region and the third light chain variable region comprise or consist of the corresponding amino acid sequences specified above.

[1059] In some aspects, the anti-SARS-CoV2 multivalent antibody further comprises a fourth antigen binding domain.

[1060] In some aspects, the fourth antigen binding site is different than one or more of the first, second and third antigen binding sites.

[1061] In some aspects, the first, second, third and fourth antigen binding sites are different.

[1062] In some aspects, the fourth antigen binding site comprises a third heavy chain variable domain and a fourth light chain variable domain.

[1063] In some aspects, the fourth heavy chain variable domain comprises an amino acid sequence having at least 80%, at least 85%, at least 90%, at least 91%, at least 92%, at least 93%, at least 94%, at least 95%, at least 96%, at least 97%, at least 98%, or 100% identity to any one of SEQ ID NOs:42, 50, 58, 66, 74, 170, 178, 186, 263, 271, 279, 287, 510, 512, 520, 528, 536, 544, 552, 560, 568, 576, 584, 592, 600, 608, 616, 624, 626, 628, 630, 632, 634, 636, 638, 646, 654, 663, 779, 781, 785 and 787; and the fourth light chain variable domain comprises an amino acid sequence having at least 80%, at least 85%, at least 90%, at least 91%, at least 92%, at least 93%, at least 94%, at least 95%, at least 96%, at least 97%, at least 98%, or 100% identity to any one of SEQ ID NOs:38, 46, 54, 62, 70, 166, 174, 182, 259, 267, 275, 283, 508, 509, 511, 516, 524, 532, 540, 548, 556, 564, 572, 580, 588, 596, 604, 612, 620, 625, 627, 629, 631, 633, 635, 637, 642, 650, 659 and 667. In some aspects, the sequence has a mutation at N62, for example, N62Q or N62Q at, for example, SEQ ID NO:279. In some preferred aspects, the fourth heavy chain variable region has at least 90% identity with the corresponding amino acid sequences specified above, optionally with a mutation at N62 as recited above. As used herein, “at least 90% identity” includes at least 91%, 92%, 93%, 94%, 95%, 96%, 97%, 98%, 99% and 100% identity to the recited reference sequence. In some particularly preferred aspects, the fourth heavy chain variable region comprises or consists of the corresponding amino acid sequences specified above, optionally with a mutation at N62 as specified above.

[1064] In some aspects, the fourth heavy chain variable region comprises CDR1, CDR2 and CDR3 regions.

[1065] In some aspects, the CDR1 of the fourth heavy chain variable region comprises an amino acid sequence having at least 80%, at least 85%, at least 90%, at least 91%, at least 92%, at least 93%, at least 94%, at least 95%, at least 96%, at least 97%, at least 98%, at least 99% or 100% identity to any one of SEQ ID NOs:43, 51, 59, 67, 75, 171, 179, 187, 264, 272, 280, 288, 513, 521, 529, 537, 545, 553, 561, 569, 577, 585, 593, 601, 609, 617, 639, 647, 656 and 664; the CDR2 of the fourth heavy chain variable region comprises an amino acid sequence having at least 80%, at least 85%, at least 90%, at least 91%, at least 92%, at least 93%, at least 94%, at least 95%, at least 96%, at least 97%, at least 98%, at least 99% or 100% identity to any one of SEQ ID NOs:44, 52, 60, 68, 76, 172, 180, 188, 265, 273, 281, 289, 514, 522, 530, 538, 546, 554, 562, 570, 578, 586, 594, 602, 610, 618, 640, 648, 657 and 665; the CDR3 of the fourth heavy chain variable region comprises an amino acid sequence having at least 80%, at least 85%, at least 90%, at least 91%, at least 92%, at least 93%, at least 94%, at least 95%, at least 96%, at least 97%, at least 98%, at least 99% or 100% identity to any one of SEQ ID NOs:45, 53, 61, 69, 77, 173, 181, 189, 266, 274, 282, 290, 515, 523, 531, 539, 547, 555, 563, 571, 579, 587, 595, 603, 611, 619, 641, 649, 658 and 666; the CDR1 of the fourth light chain variable region comprises an amino acid sequence having at least 80%, at least 85%, at least 90%, at least 91%, at least 92%, at least 93%, at least 94%, at least 95%, at least 96%, at least 97%, at least 98%, at least 99% or 100% identity to any one of SEQ ID NOs:39, 47, 55, 63, 71, 167, 175, 183, 260, 268, 276, 284, 517, 525, 533, 541, 549, 557, 565, 573, 581, 589, 597, 605, 613, 621, 643, 651, 660 and 668; the CDR2 of the fourth light chain variable region comprises an amino acid sequence having at least 80%, at least 85%, at least 90%, at least 91%, at least 92%, at least 93%, at least 94%, at least 95%, at least 96%, at least 97%, at least 98%, at least 99% or 100% identity to any one of SEQ ID NOs:40, 48, 56, 64, 72, 168, 176, 184, 261, 269, 277 (having the sequence of LGS), 285, 518 (having the sequence of DAS), 526 (having the sequence of DVS), 534 (having the sequence of EDS), 542 (having the sequence of KDS), 550 (having the sequence of DAS), 558 (having the sequence of AAS), 566 (having the sequence of GAS), 574 (having the sequence of DDS), 582 (having the sequence of KDS), 590 (having the sequence of SAS), 598 (having the sequence of SAS), 606 (having the sequence of GAS), 614 (having the sequence of GAS), 622 (having the sequence of GAS), 644 (having the sequence of GAS), 652 (having the sequence of SAS), 661 (having the sequence of GAS) and 669 (having the sequence of DAS); and the CDR3 of the fourth light chain variable region comprises an amino acid sequence having at least 80%, at least 85%, at least 90%, at least 91%, at least 92%, at least 93%, at least 94%, at least 95%, at least 96%, at least 97%, at least 98%, at least 99% or 100% identity to any one of SEQ ID NOs:41, 49, 57, 65, 73, 169, 177, 185, 262, 270, 278, 286, 519, 527, 535, 543, 551, 559, 567, 575, 583, 591, 599, 607, 615, 623, 645, 653, 662 and 670. In some preferred aspects, CDR1, CDR2 and CDR3 of the fourth heavy chain variable region and the fourth light chain variable region have at least 90% identity with the corresponding amino acid sequences specified above. As used herein, “at least 90% identity” includes at least 91%, 92%, 93%, 94%, 95%, 96%, 97%, 98%, 99% and 100% identity to the recited reference sequence. In some particularly preferred aspects, CDR1, CDR2 and CDR3 of each of fourth heavy chain variable region and the fourth light chain variable region comprise or consist of the corresponding amino acid sequences specified above.

[1066] In some aspects of any of the antigen binding polypeptides or antigen binding polypeptide complexes provided herein, one or more VL (e.g., VL1, VL2, VL3 and/or VL4) comprises an amino acid sequence having at least 80%, at least 85%, at least 90%, at least 95%, at least 99%, or 100% identity to a peptide in the expression vector of SEQ ID NO:783. In some aspects, such a polypeptide or polypeptide complex further comprises one or more VH (e.g., VH1, VH2, VH3 and/or VH4) that comprises an amino acid having at least 80%, at least 85%, at least 90%, at least 95%, at least 99%, or 100% identity to any one of SEQ ID NOs:279, 779, 781, 785 and 787.

[1067] In some aspects of any of the antigen binding polypeptides or antigen binding polypeptide complexes provided herein, one or more VL (e.g., VL1, VL2, VL3 and/or VL4) is encoded by a polynucleotide sequence having at least 80%, at least 85%, at least 90%, at least 95%, at least 99%, or 100% identity to SEQ ID NO:784. In some aspects, such a polypeptide or polypeptide complex further comprises one or more VH (e.g., VH1, VH2, VH3 and/or V14) that comprises an amino acid having at least 80%, at least 85%, at least 90%, at least 95%, at least 99%, or 100% identity to any one of SEQ ID NOs:279, 779, 781, 785 and 787.

[1068] In some aspects of any of the antigen binding polypeptides or antigen binding polypeptide complexes provided herein, one or more VH (e.g., VH1, VH2, VH3 and/or V14) is encoded by a polynucleotide sequence having at least 80%, at least 85%, at least 90%, at least 95%, at least 99%, or 100% identity to SEQ ID NO:778. In some aspects, such a polypeptide or polypeptide complex further comprises one or more VL (e.g., VL1, VL2, VL3 and/or VL4) that comprises an amino acid having at least 80%, at least 85%, at least 90%, at least 95%, at least 99%, or 100% identity to SEQ ID NO:275.

[1069] In some aspects of any of the antigen binding polypeptides or antigen binding polypeptide complexes provided herein, one or more VH (e.g., VH1, VH2, VH3 and/or V14) comprises an amino acid sequence having at least 80%, at least 85%, at least 90%, at least 95%, at least 99%, or 100% identity to SEQ ID NO:779. In some aspects, such a polypeptide or polypeptide complex further comprises one or more VL (e.g., VL1, VL2, VL3 and/or VL4) that comprises an amino acid having at least 80%, at least 85%, at least 90%, at least 95%, at least 99%, or 100% identity to SEQ ID NO:275.

[1070] In some aspects of any of the antigen binding polypeptides or antigen binding polypeptide complexes provided herein, one or more VH (e.g., VH1, VH2, VH3 and/or V14) is encoded by a polynucleotide having at least 80%, at least 85%, at least 90%, at least 95%, at least 99%, or 100% identity to SEQ ID NO:780. In some aspects, such a polypeptide or polypeptide complex further comprises one or more VL (e.g., VL1, VL2, VL3 and/or VL4) that comprises an amino acid having at least 80%, at least 85%, at least 90%, at least 95%, at least 99%, or 100% identity to SEQ ID NO:275.

[1071] In some aspects of any of the antigen binding polypeptides or antigen binding polypeptide complexes provided herein, one or more VH (e.g., VH1, VH2, VH3 and/or V14) comprises an amino acid sequence having at least 80%, at least 85%, at least 90%, at least 95%, at least 99%, or 100% identity to SEQ ID NO:781. In some aspects, such a polypeptide or polypeptide complex further comprises one or more VL (e.g., VL1, VL2, VL3 and/or VL4) that comprises an amino acid having at least 80%, at least 85%, at least 90%, at least 95%, at least 99%, or 100% identity to SEQ ID NO:275.

[1072] In some aspects of any of the antigen binding polypeptides or antigen binding polypeptide complexes provided herein, one or more VH (e.g., VH1, VH2, VH3 and/or V14) is encoded by a polynucleotide having at least 80%, at least 85%, at least 90%, at least 95%, at least 99%, or 100% identity to SEQ ID NO:782. In some aspects, such a polypeptide or polypeptide complex further comprises one or more VL (e.g., VL1, VL2, VL3 and/or VL4) that comprises an amino acid having at least 80%, at least 85%, at least 90%, at least 95%, at least 99%, or 100% identity to SEQ ID NO:275.

[1073] In some aspects of any of the antigen binding polypeptides or antigen binding polypeptide complexes provided herein, one or more VH (e.g., VH1, VH2, VH3 and/or V14) comprises an amino acid sequence having at least 80%, at least 85%, at least 90%, at least 95%, at least 99%, or 100% identity to a peptide in the expression vector of SEQ ID NO:785. In some aspects, such a polypeptide or polypeptide complex further comprises one or more VL (e.g., VL1, VL2, VL3 and/or VL4) that comprises an amino acid having at least 80%, at least 85%, at least 90%, at least 95%, at least 99%, or 100% identity to SEQ ID NO:275.

[1074] In some aspects of any of the antigen binding polypeptides or antigen binding polypeptide complexes provided herein, one or more VH (e.g., VH1, VH2, VH3 and/or V14) is encoded by a polynucleotide having at least 80%, at least 85%, at least 90%, at least 95%, at least 99%, or 100% identity to SEQ ID NO:786. In some aspects, such a polypeptide or polypeptide complex further comprises one or more VL (e.g., VL1, VL2, VL3 and/or VL4) that comprises an amino acid having at least 80%, at least 85%, at least 90%, at least 95%, at least 99%, or 100% identity to SEQ ID NO:275.

[1075] In some aspects of any of the antigen binding polypeptides or antigen binding polypeptide complexes provided herein, one or more VH (e.g., VH1, VH2, VH3 and/or V14) comprises an amino acid sequence having at least 80%, at least 85%, at least 90%, at least 95%, at least 99%, or 100% identity to a peptide in the expression vector of SEQ ID NO:787. In some aspects, such a polypeptide or polypeptide complex further comprises one or more VL (e.g., VL1, VL2, VL3 and/or VL4) that comprises an amino acid having at least 80%, at least 85%, at least 90%, at least 95%, at least 99%, or 100% identity to SEQ ID NO:275.

[1076] In some aspects of any of the antigen binding polypeptides or antigen binding polypeptide complexes provided herein, one or more VH (e.g., VH1, VH2, VH3 and/or V14) is encoded by a polynucleotide having at least 80%, at least 85%, at least 90%, at least 95%, at least 99%, or 100% identity to SEQ ID NO:788. In some aspects, such a polypeptide or polypeptide complex further comprises one or more VL (e.g., VL1, VL2, VL3 and/or VL4) that comprises an amino acid having at least 80%, at least 85%, at least 90%, at least 95%, at least 99%, or 100% identity to SEQ ID NO:275.

[1077] In some aspects, the anti-SARS-CoV2 multivalent antibody is any antibody or antigen binding fragment thereof described herein.

[1078] In some aspects, the antigen is the SARS-CoV-2 protein. In some aspects, the SARS-CoV-2 protein is a membrane protein, nucleocapsid protein, envelope protein, or spike protein, or a combination thereof. In some aspects, the SARS-CoV-2 protein is a spike protein.

[1079] In some aspects, the SARS-CoV2 virus is a SARS-CoV2 variant.

[1080] In some aspects, the SARS-CoV2 variant is Alpha variant (B.1.1.7), Beta variant (B.1.351), Gamma variant (P.1), Delta variant, Epsilon variant (B.1.427), or Omicron variant (B.1.1.529), or a combination thereof.

[1081] In some aspects, the Omicron variant is BA.1, BA.2, BA.2.12.1, BA.4, BA.4/5, BA.5, BQ.1, BQ.1.1, BA.2.75, BA.2.75.2, BA.4.6, BQ.1.1, BJ.1, XBB, XBB1.5, BF.7, CH.1.1, or a combination thereof.

[1082] In some aspects, the method further comprises administering to the subject an effective amount of one or more additional pharmaceutical agents (e.g., 1, 2, 3, 4, 5 or more). In some aspects, the method further comprises administering to the subject an effective amount of an additional pharmaceutical agent. In some aspects, treating or preventing a disease as disclosed herein further comprises administering to the subject an effective amount of one or more additional pharmaceutical agents (e.g., 1, 2, 3, 4, 5 or more). In some aspects, treating or preventing a disease as disclosed herein further comprises administering to the subject an effective amount of an additional pharmaceutical agent.

[1083] In some aspects, the method further comprises administering to the subject an effective amount of one or more pharmaceutical compositions comprising (i) an additional pharmaceutical agent and (ii) a pharmaceutically acceptable carrier (e.g., 1, 2, 3, 4, 5 or more). In some aspects, the method further comprises administering to the subject an effective amount of a pharmaceutical composition comprising (i) an additional pharmaceutical agent and (ii) a pharmaceutically acceptable carrier. In some aspects, treating or preventing a disease as disclosed herein further comprises administering to the subject an effective amount of one or more pharmaceutical compositions comprising (i) an additional pharmaceutical agent and (ii) a pharmaceutically acceptable carrier (e.g., 1, 2, 3, 4, 5 or more). In some aspects, treating or preventing a disease as disclosed herein further comprises administering to the subject an effective amount of a pharmaceutical composition comprising (i) an additional pharmaceutical agent and (ii) a pharmaceutically acceptable carrier.

[1084] In some aspects, the additional pharmaceutical agent is 25-hydroxyvitamin D, an agent that potentiates vitamin D action, an anti-viral agent, an anti-malarial agent, an antibiotic, or a combination thereof.

[1085] In some aspects, the additional pharmaceutical agent is 25-hydroxyvitamin D.

[1086] In some aspects, the agent that potentiates vitamin D action is a CYP24 inhibitor, 1,25-dihydroxyvitamin D compound, or a combination thereof.

[1087] In some aspects, the anti-viral agent is an anti-retroviral agent, an antibody against SARS-CoV-2 virus, an inhibitor of reverse transcriptase, or a combination thereof.

[1088] In some aspects, the anti-viral agent is maraviroc, enfuvirtide, amantadine, lamivudine, nevirapine, efavirenz, dolutegravir, elvitegravir, raltegravir, acyclovir and any nucleoside analog of aciclovir, ganciclovir, cidofovir, forcarnet, ribavirin, interferon alpha, pegylated interferon alpha, boceprevir, atazanavir, darunavir, indinavir, oseltamivir, zanamivir, rimantadine, peremivir, valaciclovir, penciclovir, valganciclovir, foscarnet, tenofovir, adefovir, entecavir, lamivudine, telbivudine, ribavirin, glecaprevir, grazoprevir, paritaprevir, simeprevir, voxilaprevir, daclatasvir, elbasvir, ledipasvir, ombitasvir, pibrentasvir, velpatasvir, dasabuvir, famciclovir, remdesivir, trifluridine, sofobuvir, bebtelovimab, or a combination thereof.

[1089] In some aspects, the anti-viral agent is bebtelovimab.

[1090] In some aspects, the anti-viral agent is Retrovir® (3′-azido-3′-deoxypyrimidine, zidovudine), 3′-azido-3′-deoxythymidine (AZT), HMD® (2′,3′-dideoxycytidine, zalcitabine), VidexEC® (2′,3′dideoxyinosine, didanosine), Epivir® (lamivudine), Zerit® (stavudine), Viread® (tenofovir DF), Ziagen® (abacavir), Emtriva® (emtricitabine, FTC), Rescriptor® (delavirdine), Sustiva® (efavirenz), Viramune® (nevirapine, 11-cyclopropyl-4-methyl-5,11-dihydro-6H-dipyrido[3,2-b:2′,3′-e][1,4]diazepin-6-one), trisodium phosphonoformate, ammonium-21-tungstenato-9-antimonate, 1-β-D-ribofuranoxyl-1,2,4-triazole-3-carboxamide, Aganerase® (amprenavir), Reyataz® (atazanavir), Lexiva® (fosamprenavir), Crixivan® (indinavir), Viracept® (nelfinavir), Norvir® (ritonavir), Fortovase® or Invirase® (saquinavir), lasinavir (5(S)-(tert-butoxycarbonylamino)-4(S)-hydroxy-6-phenyl-2(R)(2,3,4-trimethoxyphenylmethyl)-hexanoyl-(L)-valyl-N-(2-metoxy-ethyl)-amide), adriamycin, KVX-478, VX-478, 141W94, AG-1343, KNI-272, U-96988, BILA-2011 BS (palinavir), polymannoacetate, Fuzeon® (enfuvirtide, T-20), Epzicom® (abacavir and lamivudine), Trizivir® (abacavir, lamivudine and zidovudine), Truvada® (emtricitabine and tenofir DF), Combivir® (lamivudine and zidovudine), Kaletra® (lopinavir and ritonavir), bebtelovimab, or a combination thereof.

[1091] In some aspects, the additional pharmaceutical agent is administered before the antigen binding polypeptide, antigen binding polypeptide complex, antibody or antigen binding fragment thereof.

[1092] In some aspects, the additional pharmaceutical agent is administered after the antigen binding polypeptide, antigen binding polypeptide complex, antibody or antigen binding fragment thereof.

[1093] In some aspects, the additional pharmaceutical agent is administered concurrently with the antigen binding polypeptide, antigen binding polypeptide complex, antibody or antigen binding fragment thereof.

[1094] In some aspects, the additional pharmaceutical agent and the antigen binding polypeptide, antigen binding polypeptide complex, antibody or antigen binding fragment thereof are administered in the same pharmaceutical composition.

[1095] In some aspects, the additional pharmaceutical agent and the antigen binding polypeptide, antigen binding polypeptide complex, antibody or antigen binding fragment thereof are administered in different pharmaceutical compositions.

### EXAMPLES

[1096] The following examples are provided to further illustrate aspects of the disclosure, and are not meant to constrain the disclosure to any particular application or theory of operation.

### Example 1

### Synthesis, Cloning and Expression of Multispecific Antibodies

[1097] After design of the amino acid sequences for each multispecific antibody, the genes for each multispecific antibody were synthesized using human preferred codons (GeneArt) and cloned into eukaryotic expression vectors. For each multispecific antibody expression, the single plasmid DNA (bispecific) and equal amounts of the two plasmid DNAs (trispecific) were transfected into Expi293F cells (Thermo Fisher Scientific) using PEI MAX (Polysciences). The transfected cells were cultured in a shaker incubator at 120 rpm, 37° C., 9% CO2 for 5 days. Culture supernatants were harvested and filtered, the multispecific antibodies were purified over a Protein A (GE Health Science) column. Each multispecific antibody was eluted with Pierce IgG Elution Buffer, pH 2.0 (Thermo Fisher Scientific), immediately buffer exchanged with Histidine pH 6.0 and concentrated using Amicon Ultra-15 Centrifugal Filter Units (MilliporeSigma). After concentration, each multispecific antibody was applied to a Superdex 200 16/600 size exclusion column (Cytiva) to remove aggregates and different species in the preparation. The fractions were then analyzed on reduced and non-reduced sodium dodecyl sulfate-polyacrylamide gel electrophoresis (SDS-PAGE) to identify the fractions that contained the monomeric multispecific antibody before combining them. The pooled fractions were then further concentrated, aliquoted, and analyzed by SDS-PAGE as well as an analytical size exclusion chromatography (SEC) column (Superdex 200 16/600) to verify purity.

[1098] FIG. 1A-1D shows exemplary configurations of monospecific, tetravalent molecules made. FIG. 1A: monospecific, tetravalent molecule containing VH and VL of the anti-SARS-CoV-2 antibody, B1-182, with Fc region (MX241). FIG. 1B: monospecific, tetravalent molecule containing VH and VL of B1-182, with Fc, CL and CH1 (MX365). FIG. 1C: monospecific, tetravalent molecule containing VH and VL of the anti-SARS-CoV-2 hybrid antibody, A23-58H/B1-182L, with Fc (MX409). FIG. 1D: monospecific, tetravalent molecule containing VH and VL of A23-58H/B1-182L, with Fc, CL and CH1 (MX466).

[1099] FIG. 2A-2P shows exemplary configurations of bispecific, tetravalent molecules made. FIG. 2A: bispecific, tetravalent molecule containing VH and VL of B1-182 and VH and VL of the anti-SARS-CoV-2 antibody, A19-46, with Fc (MX179). FIG. 2B: bispecific, tetravalent molecule containing VH and VL of B1-182 and VH and VL of A19-46, with Fc (MX180). FIG. 2C: bispecific, tetravalent molecule containing VH and VL of B1-182 antibody and VH and VL of the anti-SARS-CoV-2 antibody, A19-61, with Fc (MX183). FIG. 2D: bispecific, tetravalent molecule containing VH and VL of B1-182 and VH and VL of A19-61, with Fc (MX184). FIG. 2E: bispecific, tetravalent molecule containing VH and VL of B1-182 and VH and VL of A19-61, with Fc, CL and CH1 (MX366). FIG. 2F: bispecific, tetravalent molecule containing VH and VL of B1-182 and VH and VL of A19-61, with Fc, CL and CH1 (MX367). FIG. 2G: bispecific, tetravalent molecule containing VH and VL of A23-58H/B1-182L and VH and VL of A19-61, with Fc (MX412). FIG. 2H: bispecific, tetravalent molecule containing VH and VL of A23-58H/B1-182L and VH and VL of A19-61, with Fc (MX413). FIG. 2I: bispecific, tetravalent molecule containing VH and VL of A23-58H/B1-182L and VH and VL of A19-46, with Fc (MX490). FIG. 2J: bispecific, tetravalent molecule containing VH and VL of A23-58H/B1-182L and VH and VL of A19-46, with Fc (MX492). FIG. 2K: bispecific, tetravalent molecule containing VH and VL of A23-58H/B1-182L hybrid antibody and VH and VL of A19-61 antibody, with Fc, CL and CH1 (MX467). FIG. 2L: bispecific, tetravalent molecule containing VH and VL of A23-58H/B1-182L and VH and VL of A19-61, with Fc, CL and CH1 (MX468). FIG. 2M: bispecific, tetravalent molecule containing VH and VL of A23-58H/B1-182L and VH and VL of A19-46, with Fc, CL and CH1 (MX491). FIG. 2N: bispecific, tetravalent molecule containing VH and VL of A23-58H/B1-182L and VH and VL of A19-46, with Fc, CL and CH1 (MX493). FIG. 2O: bispecific, tetravalent molecule containing VH and VL of the anti-SARS-CoV-2 antibody, A23-58, and VH and VL of A19-61 (MX326). FIG. 2P: bispecific, tetravalent molecule containing VH and VL of A23-58 and VH and VL of A19-61 (MX327).

[1100] FIG. 3A-3H shows exemplary configurations of trispecific, tetravalent molecules made. FIG. 3A: trispecific, tetravalent molecule containing VH and VL of A19-46 antibody, VH and VL of A19-61 antibody, and VH and VL of B1-182 antibody with Fc and knob-into-hole modification (MX494). FIG. 3B: trispecific, tetravalent molecule containing VH and VL of A19-46 antibody, VH and VL of A19-61 antibody, and VH and VL of B1-182 antibody with Fc and knob-into-hole modification (MX495). FIG. 3C: trispecific, tetravalent molecule containing VH and VL of A19-46 antibody, VH and VL of A19-61 antibody, and VH and VL of B1-182 antibody with Fc and knob-into-hole modification (MX496). FIG. 3D: trispecific, tetravalent molecule containing VH and VL of A19-46 antibody, VH and VL of A19-61 antibody, and VH and VL of B1-182 antibody with Fc and knob-into-hole modification (MX497). FIG. 3E: trispecific, tetravalent molecule containing VH and VL of A19-46 antibody, VH and VL of A19-61 antibody, and VH and VL of A23-58H/B1-182L hybrid antibody with Fc and knob-into-hole modification (MX498). FIG. 3F: trispecific, tetravalent molecule containing VH and VL of A19-46 antibody, VH and VL of A19-61 antibody, and VH and VL of A23-58H/B1-182L hybrid antibody with Fc and knob-into-hole modification (MX499). FIG. 3G: trispecific, tetravalent molecule containing VH and VL of A19-46 antibody, VH and VL of A19-61 antibody, and VH and VL of A23-58H/B1-182L hybrid antibody with Fc and knob-into-hole modification (MX500). FIG. 3H: trispecific, tetravalent molecule containing VH and VL of A19-46 antibody, VH and VL of A19-61 antibody, and VH and VL of A23-58H/B1-182L hybrid antibody with Fc and knob-into-hole modification (MX501).

[1101] FIG. 11 shows exemplary configurations of tetravalent, bispecific and tetravalent, trispecific molecules made. MX828 contains two VH/VL pairs of A19-46 and two VH/VL pairs of A23-58H/A23-58L93VGLTG. MX829 contains two VH/VL pairs of A19-61 and two VH/VL pairs of A23-58H/A23-58L93VGLTG. MX830 contains two VH/VL pairs of A19-46 and two VH/VL pairs of A23-58H/A23-58L94GLTG. MX831 contains two VH/VL pairs of A19-61 and two VH/VL pairs of A23-58H/A23-58L94GLTG. MX834 and MX837 contain one VH/VL pair of A19-46, one VH/VL pair of A19-61, and two VH/VL pairs of A23-58H/A23-58L93VGLTG. MX835 and MX838 contain one VH/VL pair of A19-46, one VH/VL pair of A19-61, and two VH/VL pairs of A23-58H/A23-58L94GLTG.

### Example 2

### Pseudovirus Neutralization Assay

[1102] The pseudotyped neutralization potency (IC50 and IC80) of multispecific antibodies described in Example 1 was then determined. Specifically, S-containing lentiviral pseudovirions were produced by co-transfection of packaging plasmid pCMVAR8.2, transducing plasmid pHR′ CMV-Luc, a TMPRSS2 plasmid, and S plasmids from SARS-CoV-2 variants into Lenti-X 293T Cell Line (Takara) using FuGENE 6 Transfection Reagent (Promega). Human ACE2 293T Cell Line (Takara) were plated into 96-well Flat Clear Bottom White Polystyrene TC-treated Microplates (Corning) at 75,00 cells per well the day before infection of SARS CoV-2 pseudovirus. Serial dilutions of multispecific antibodies were mixed with titrated pseudovirus, incubated for 45 minutes at 37° C. and added to cells in triplicate. Cells were lysed 72 h later, and luciferase activity was measured with Varioskan LUX Multimode Microplate Reader (Thermo Fisher Scientific). Percent neutralization and neutralization IC50 and IC80 were calculated using GraphPad Prism 9.3.1.

[1103] Tables 2-7 show the IC50 and IC80 values (in nM) of multispecific antibodies described in Example 1 for neutralization of SARS-CoV-2 original Wuhan strain (WT), D614G spike protein mutant (D614G), Alpha variant (B.1.1.7), Beta variant 1 (B.1.351 v1), Gamma variant (P.1), Kappa variant (B.1.617.1) Delta variants (B.1.617.2 and AY.1), Iota variant (B.1.526), Lambda variant (C.37) Mu variant (B.1.621), C.1.2 variant, Omicron variants (BA.1, BA.2, BA.2.12.1, and BA.4/5). IC50 and IC80 values for the A23-58, B1-182, A23-58H/B1-182L hybrid, A19-46, and A19-61 parental antibodies are also shown.

TABLE 2

| | WT | | D614G | | B.1.1.7 | |
|---|---|---|---|---|---|---|
| Name | IC50 | IC80 | IC50 | IC80 | IC50 | IC80 |
| A23-58 mAb | | | 0.0185 | 0.0477 | 0.0329 | 0.1041 |
| B1-182 mAb | 0.0264 | 0.0692 | 0.0171 | 0.0359 | 0.0262 | 0.0844 |
| A23-58H/B1-182L mAb | | | 0.0132 | 0.0337 | 0.0174 | 0.0376 |
| A19-61 mAb | 0.1725 | 0.4078 | 0.0550 | 0.1258 | 0.1747 | 0.3251 |
| A19-46 mAb | 0.2633 | 0.7783 | 0.1379 | 0.3893 | 0.1899 | 0.4859 |
| MX241 (B1-182 Tetravalent) | | | 0.0045 | 0.0134 | 0.0175 | 0.0419 |
| MX409 (A23-58H/B1-182L Tetravalent) | | | 0.0051 | 0.0113 | 0.0139 | 0.0286 |
| MX183 (A19-61 × B1-182) | | | 0.7571 | 1.6249 | 0.8030 | 5.6644 |
| MX184 (B1-182 × A19-61) | | | 0.0196 | 0.0597 | 0.0772 | 0.1856 |
| MX412 (A23-58H/B1-182L × A19-61) | | | 0.0294 | 0.0681 | 0.0580 | 0.1432 |
| MX413 (A19-61 × A23-58H/B1-182L) | | | 0.0193 | 0.0479 | 0.0547 | 0.1408 |

TABLE 3

| | B.1.351.v1 | | P.1 | | B.1.617.2 | |
|---|---|---|---|---|---|---|
| Name | IC50 | IC80 | IC50 | IC80 | IC50 | IC80 |
| A23-58 mAb | 0.1227 | 0.3389 | 0.0097 | 0.0437 | 0.0133 | 0.0358 |
| B1-182 mAb | 0.0357 | 0.1390 | 0.0182 | 0.0429 | 0.0099 | 0.0254 |
| A23-58H/B1-182L mAb | 0.0305 | 0.0966 | 0.0116 | 0.0237 | 0.0104 | 0.0205 |
| A19-61 mAb | 0.0686 | 0.1127 | 0.1352 | 0.2885 | 0.2090 | 0.2917 |
| A19-46 mAb | 0.8074 | 2.0716 | 0.2600 | 0.7000 | >66.7 | >66.7 |
| MX241 (B1-182 Tetravalent) | 0.0133 | 0.0434 | 0.004712 | 0.013749 | 0.004467 | 0.013909 |
| MX409 (A23-58H/B1-182L Tetravalent) | 0.0073 | 0.0175 | 0.001817 | 0.00565 | 0.003127 | 0.008822 |
| MX183 (A19-61 × B1-182) | 1.0235 | 1.6494 | 0.429548 | 2.265246 | 0.229678 | 0.947623 |
| MX184 (B1-182 × A19-61) | 0.0441 | 0.1200 | 0.032549 | 0.13742 | 0.012894 | 0.045828 |
| MX412 (A23-58H/B1-182L × A19-61) | 0.0365 | 0.0840 | 0.041954 | 0.088517 | 0.027924 | 0.06254 |
| MX413 (A19-61 × A23-58H/B1-182L) | 0.0386 | 0.0920 | 0.025005 | 0.054702 | 0.019271 | 0.06548 |

TABLE 4

| | B.1.617.1 | | B.1.526 | | C.37 | |
|---|---|---|---|---|---|---|
| Name | IC50 | IC80 | IC50 | IC80 | IC50 | IC80 |
| A23-58 mAb | | | | | | |
| B1-182 mAb | 0.0261 | 0.0860 | 0.0639 | 0.1831 | 0.0049 | 0.0150 |
| A23-58H/B1-182L mAb | | | | | | |
| A19-61 mAb | 0.0815 | 0.1732 | 0.0418 | 0.0836 | 0.1099 | 0.1865 |
| A19-46 mAb | >66.7 | >66.7 | 0.8033 | 1.8820 | >66.7 | >66.7 |

TABLE 5

| | B.1.621 | | C.1.2 | | AY.1 | |
|---|---|---|---|---|---|---|
| Name | IC50 | IC80 | IC50 | IC80 | IC50 | IC80 |
| A23-58 mAb | 0.1240 | 0.2600 | 0.0287 | 0.0656 | | |
| B1-182 mAb | 0.0695 | 0.2188 | 0.0549 | 0.1096 | 0.0080 | 0.0192 |
| A23-58H/B1-182L mAb | 0.0402 | 0.1081 | 0.0207 | 0.0348 | | |
| A19-61 mAb | 0.2639 | 0.4296 | 8.4254 | >66.7 | 0.0557 | 0.1207 |
| A19-46 mAb | 1.3387 | 3.8125 | 11.6200 | 21.0215 | >66.7 | >66.7 |
| MX241 (B1-182 Tetravalent) | 0.0184 | 0.0852 | 0.0039 | 0.0176 | 0.0035 | 0.0077 |
| MX409 (A23-58H/B1-182L Ttravalent) | 0.0046 | 0.0124 | 0.0050 | 0.0099 | | |
| MX183 (A19-61 × B1-182) | | | | | 0.5425 | 1.0383 |
| MX184 (B1-182 × A19-61) | | | | | 0.0174 | 0.0300 |
| MX412 (A23-58H/B1-182L × A19-61) | 0.5826 | 1.7763 | 0.0140 | 0.0528 | | |
| MX413 (A19-61 × A23-58H/B1-182L) | 0.0890 | 0.1661 | 0.0109 | 0.0260 | | |

TABLE 6

| | BA.1 | | BA.2 | | BA.2.12.1 | |
|---|---|---|---|---|---|---|
| Name | IC50 | IC80 | IC50 | IC80 | IC50 | IC80 |
| A23-58 mAb | 0.8529 | 4.2362 | 1.6769 | 5.6879 | 0.6471 | 4.9635 |
| B1-182 mAb | 1.0322 | 4.4388 | 2.3398 | 8.1854 | 0.7393 | 5.9249 |
| A23-58H/B1-182L mAb | 0.3638 | 1.3930 | 0.5437 | 2.4827 | 0.8298 | 3.2735 |
| A19-61 mAb | >66.7 | >66.7 | 0.7245 | 2.2411 | 0.1104 | 0.2980 |
| A19-46 mAb | 0.9580 | 2.2810 | 0.0645 | 0.1766 | >66.7 | >66.7 |
| MX241 (B1-182 Tetravalent) | 1.7089 | >6.7 | >6.7 | >6.7 | 5.6456 | >6.7 |
| MX409 (A23-58H/B1-182L Tetravalent) | 2.0254 | >66.7 | 4.9034 | >66.7 | 8.9648 | 52.7028 |
| MX183 (A19-61 × B1-182) | >66.7 | >66.7 | | | | |
| MX184 (B1-182 × A19-61) | 47.5701 | >66.7 | | | | |
| MX412 (A23-58H/B1-182L × A19-61) | 8.9636 | 31.8446 | 0.0304 | 0.0803 | 0.0615 | 0.1777 |
| MX413 (A19-61 × A23-58H/B1-182L) | 6.5827 | 20.5053 | 0.0141 | 0.0466 | 0.0149 | 0.0614 |
| MX466 (A23-58H/B1-182L Cl-CH1 Tetravalent) | 0.5703 | 8.2302 | 2.4675 | 44.2086 | 0.5863 | 18.0438 |
| MX467 (A23-58H/B1-182L × A19-61 CL-CH1) | 18.4909 | 69.3602 | 0.0373 | 0.0738 | 0.0181 | 0.1266 |
| MX468 (A19-61 × A23-58H/B1-182L CL-CH1) | 1.3331 | 4.0621 | 0.0289 | 0.0617 | 0.0224 | 0.0698 |
| MX179 (A19-46 × B1-182) | 0.0068 | 0.0193 | 0.0137 | 0.0389 | 0.1667 | 0.9290 |
| MX180 (B1-182 × A19-46) | 0.0187 | 0.0652 | 0.0410 | 0.1032 | 0.5839 | 2.8244 |
| MX494 (A19-61 × B1-182/A19-46 × B1-182) | 0.0227 | 0.0671 | 0.0053 | 0.0192 | 0.0248 | 0.0915 |
| MX495 (A19-61 × B1-182/B1-182 × A19-46) | 0.0780 | 0.1899 | 0.0191 | 0.0540 | 0.0513 | 0.0952 |
| MX496 (B1-182 × A19-61/A19-46 × B1-182) | 0.0907 | 0.2639 | 0.0231 | 0.0805 | 0.0975 | 0.2243 |
| MX497 (B1-182 × A19-61/B1-182 × A19-46) | 0.1087 | 0.4867 | 0.0251 | 0.0698 | 0.1298 | 0.2250 |
| MX 490 (A23-58H/B1-182L × A19-46) | 0.2195 | 0.4838 | 0.3920 | 0.8960 | >6.7 | >6.7 |
| MX491 (A23-58H/B1-182L × A19-46 CL-CH1) | 0.0316 | 0.0928 | 0.0489 | 0.1136 | 1.4370 | 7.8069 |
| MX492 (A19-46 × A23-58H/B1-182L) | 0.0058 | 0.0369 | 0.0201 | 0.0451 | 0.1069 | 0.9301 |
| MX493 (A19-46 × A23-58H/B1-182L CL-CH1) | 0.0158 | 0.0387 | 0.0200 | 0.0464 | 0.0331 | 0.0858 |
| MX498 (A23-58H/B1-182L × A19-46/A23-58H/B1-182L × A19-61) | 0.9724 | 2.0874 | 0.0654 | 0.1170 | 0.2043 | 0.3936 |
| MX499 (A23-58H/B1-182L × A19-46/A19-61 × A23-58H/B1-182L) | 0.2528 | 0.4946 | 0.0519 | 0.0824 | 0.0644 | 0.1202 |
| MX500 (A19-46 × A23-58H/B1-182L/A23-58H/B1-182L × A19-61) | 0.0639 | 0.2039 | 0.0151 | 0.0503 | 0.0655 | 0.1448 |
| MX501 (A19-46 × A23-58H/B1-182L/A19-61 × A23-58H/B1-182L) | 0.0285 | 0.0876 | 0.0097 | 0.0250 | 0.0405 | 0.0927 |

TABLE 7

| | BA.4/5 | |
|---|---|---|
| Name | IC50 | IC80 |
| A23-58 mAb | >66.7 | >66.7 |
| B1-182 mAb | >66.7 | >66.7 |
| A23-58H/B1-182L mAb | >66.7 | >66.7 |
| A19-61 mAb | 0.1282 | 0.3220 |
| A19-46 mAb | >66.7 | >66.7 |
| MX241 (B1-182 Tetravalent) | >6.7 | >6.7 |
| MX409 (A23-58H/B1-182L Tetravalent) | >66.7 | >66.7 |
| MX183 (A19-61 × B1-182) | | |
| MX184 (B1-182 × A19-61) | | |
| MX412 (A23-58H/B1-182L × A19-61) | 0.1863 | 0.3613 |
| MX413 (A19-61 × A23-58H/B1-182L) | 0.0572 | 0.1426 |
| MX466 (A23-58H/B1-182L Cl-CH1 Tetravalent) | >66.7 | >66.7 |
| MX467 (A23-58H/B1-182L × A19-61 CL-CH1) | 0.2363 | 0.6303 |
| MX468 (A19-61 × A23-58H/B1-182L CL-CH1) | 0.0848 | 0.1770 |
| MX179 (A19-46 × B1-182) | >66.7 | >66.7 |
| MX180 (B1-182 × A19-46) | >66.7 | >66.7 |
| MX494 (A19-61 × B1-182/A19-46 × B1-182) | 1.0060 | 1.6736 |
| MX495 (A19-61 × B1-182/B1-182 × A19-46) | 0.9952 | 2.1992 |
| MX496 (B1-182 × A19-61/A19-46 × B1-182) | 3.1340 | 9.3243 |
| MX497 (B1-182 × A19-61/B1-182 × A19-46) | 2.6723 | 6.1168 |
| MX490 (A23-58H/B1-182L × A19-46) | >6.7 | >6.7 |
| MX491 (A23-58H/B1-182L × A19-46 CL-CH1) | >66.7 | >66.7 |
| MX492 (A19-46 × A23-58H/B1-182L) | >66.7 | >66.7 |
| MX493 (A19-46 × A23-58H/B1-182L CL-CH1) | >66.7 | >66.7 |
| MX498 (A23-58H/B1-182L × A19-46/A23-58H/ | 11.2154 | 30.9541 |
| B1-182L × A19-61) | | |
| MX499 (A23-58H/B1-182L × A19-46/A19-61 × | 3.3621 | 8.4065 |
| A23-58H/B1-182L) | | |
| MX500 (A19-46 × A23-58H/B1-182L/A23-58H/ | 8.0925 | 16.3658 |
| B1-182L × A19-61) | | |
| MX501 (A19-46 × A23-58H/B1-182L/A19-61 × | 1.8386 | 4.3657 |
| A23-58H/B1-182L) | | |

[1104] These results show that the bispecific, tetravalent antibodies inhibited the Omicron variants much more potently than the parental antibodies.

[1105] FIG. 4 shows the percent neutralization of Omicron variant (B.1.1.529) in the presence of increasing concentration of MX179 or MX180 antibody described in Example 1, along with B1-182 and A19-46 parental antibodies. The bispecific, tetravalent antibodies inhibited the Omicron variant much more potently than the parental antibodies.

[1106] FIG. 5 shows the percent neutralization of Omicron variant (B.1.1.529) in the presence of increasing concentration of MX179 or MX180 antibody described in Example 1, in comparison to the combination of B1-182 and A19-46 parental antibodies. The bispecific, tetravalent antibodies inhibited the Omicron variant much more potently than the combination of parental antibodies, showing a synergistic effect of the multivalency. Concentration of each antibody in the combination of three antibody mixture was plotted.

[1107] FIG. 6 shows the percent neutralization of Omicron variant (B.1.1.529) in the presence of increasing concentration of MX494, MX495, MX496 or MX497 antibody described in Example 1, in comparison to the combination of B1-182L, A19-46 and A19-61 parental antibodies. The trispecific, tetravalent antibodies inhibited the Omicron variant much more potently than the combination of parental antibodies, showing a synergistic effect of the multivalency. Concentration of each antibody in the combination of three antibody mixture was plotted.

[1108] Table 8 shows the IC50 and IC80 values (in nM) of MX828, MX829, MX830 and MX831 tetravalent, bispecific antibodies for neutralization of the SARS-CoV-2 variants, Delta (B.1.617.2) and Omicron (B.1.1.529, BA.2, BA.2.12.1, BA.4/5 and BA.1.1 (R346K)). IC50 and IC80 values for MX492, MX413, bebtelovimab (LY-CoV1404), S2E12, A23-58.1HC/58.1LC_93VGLTG, A23-58HC/58.1LC_94GLTG, and B1-182.1 are also shown for comparison. The bispecific, tetravalent antibodies potently inhibited the SARS-CoV-2 variants.

TABLE 8

| | | | Delta | | Omicron | | Omicron Sublineages | |
|---|---|---|---|---|---|---|---|---|
| | | | B.1.617.2 | | B.1.1.529 | | BA.2 | |
| Name | Antibody | Class | IC50 | IC80 | IC50 | IC80 | IC50 | IC80 |
| Bi-specific | MX828 | I + II | 74.83 | 172.86 | 4.3 | 19.48 | 13.73 | 20.27 |
| | MX829 | I + III | 29.55 | 97.83 | 34.81 | 70.13 | 3.58 | 6.06 |
| | MX830 | I + II | 63.74 | 125.32 | 10.98 | 23.46 | 9.41 | 10.75 |
| | MX831 | I + III | 29.2 | 84.01 | 75.74 | 131.63 | 0.03 | 0.08 |
| | MX492 | I + II | 41.59 | 97.83 | 9.42 | 15.89 | 15.15 | 31.18 |
| | MX413 | I + III | 29.53 | 101.22 | 156.36 | 3954.83 | 7.69 | 25.07 |
| bebtelovimab | LY-CoV1404 | III | 8.18 | 9.06 | 0.32 | 15.58 | 14.3 | 18.48 |
| | A23-58.1 | I | 1.4 | 4.7 | 98.1 | 781.8 | 262.7 | 1076.2 |
| | S2E12 | I | 1.2 | 2.6 | 8.8 | 38.5 | 9.9 | 48.2 |
| | A23-58.1HC/58.1LC_93VGLTG | I | 5.8 | 12.4 | 3.3 | 11.2 | n.t. | n.t. |
| | A23-58.1HC/58.1LC_94GLTG | I | 2.9 | 11.2 | 3.6 | 11.9 | n.t. | n.t. |
| | B1-182.1 | I | 1.57 | 7.25 | 400.98 | 1015.63 | 319.5 | 1212.04 |

| | | Omicron Sublineages | | | | | |
|---|---|---|---|---|---|---|---|
| | | | | | | BA.1.1 | |
| | | BA.2.12.1 | | BA.4/5 | | (R346K) | |
| Name | Antibody | IC50 | IC80 | IC50 | IC80 | IC50 | IC80 |
| Bi-specific | MX828 | 43.02 | 74.97 | 1007 | 5323.87 | 1.75 | 6.23 |
| | MX829 | 3.96 | 8.4 | 11.48 | 34.71 | 6.72 | 35.4 |
| | MX830 | 62.71 | 94.29 | 532.86 | 4628.36 | 10.39 | 11.49 |
| | MX831 | 38.03 | 42.94 | 25.32 | 47.02 | 17.25 | 50 |
| | MX492 | 62.91 | 180.86 | >10,000 | >10,000 | 8.77 | 67.97 |
| | MX413 | 6.32 | 32.12 | 51.24 | 73.92 | 2.24 | 10.48 |
| bebtelovimab | LY-CoV1404 | 8.52 | 14.82 | 1.88 | 3.74 | 26.44 | 65.08 |
| | A23-58.1 | 100.1 | 503.6 | >10,000 | >10,000 | n.t. | n.t. |
| | S2E12 | 15.6 | 46.6 | 713.1 | 3971.9 | n.t. | n.t. |
| | A23-58.1HC/58.1LC_93VGLTG | 3.4 | 11.5 | 3 | 13.7 | n.t. | n.t. |
| | A23-58.1HC/58.1LC_94GLTG | 1.9 | 9.2 | 4.7 | 29.6 | n.t. | n.t. |
| | B1-182.1 | 165.48 | 1375.63 | >10,000 | >10,000 | 213.36 | 1297.92 |

[1109] Table 9 shows the IC50 and IC80 values (in nM) of MX828, MX829, MX830 and MX831 tetravalent, bispecific antibodies for neutralization of the SARS-CoV-2 variants, Omicron BA.1.1 (R346K), BA.4.6 (R346T, F486V), BA.4.7 (R346S, F486V), BF.7 (R346T, F486V), BA.2.75.2 (R346T, F486S), and BQ.1.1 (R346T, K444T, F486V). MX492 and MX413 and bebtelovimab (LY1404) were also tested for comparison. And, in addition, combinations of MX828 and MX829 (MX828+MX829), MX830 and MX831 (MX830+MX831) and MX492 and MX413 (MX492+MX413) were also tested. The bispecific, tetravalent antibodies potently inhibited the SARS-CoV-2 variants.

TABLE 9

| | | | Omicron Sublineages | | | | | | |
|---|---|---|---|---|---|---|---|---|---|
| | | | BA.1.1 | | BA.4.6 | | BA.4.7 | | BF.7 |
| | | | (R346K) | | (R346T, F486V) | | (R346S, F486V) | | (R346T, F486V) |
| Name | Antibody | Class | IC50 | IC80 | IC50 | IC80 | IC50 | IC80 | IC50 |
| Bi-specific | MX828 | I + II | 1.75 | 6.23 | 123.76 | 1642.22 | 143.42 | 1756.83 | 356.39 |
| | MX829 | I + III | 6.72 | 35.4 | 17.16 | 42.7 | 2.37 | 12.96 | 3.45 |
| | MX828 + MX829 | I + II + III | n.t. | n.t. | 15.04 | 40.36 | 10.04 | 31.13 | 5.26 |
| | MX830 | I + II | 10.39 | 11.49 | 207.08 | 4648.77 | 275.85 | >10,000 | 859.58 |
| | MX831 | I + III | 17.25 | 50 | 27.91 | 58.48 | 3.08 | 19.12 | 3.73 |
| | MX830 + MX831 | I + II + III | n.t. | n.t. | 21.51 | 45.42 | 8.45 | 30.62 | 3.91 |
| | MX492 | I + II | 8.77 | 67.97 | 21.4 | 24.51 | 13.35 | 154.17 | >10,000 |
| | MX413 | I + III | 2.24 | 10.48 | 55.95 | 154.8 | 77.93 | 126.15 | 28.15 |
| | MX492 + MX413 | I + II + III | n.t. | n.t. | 94.04 | 279.93 | 22.37 | 126.81 | 131.91 |
| bebtelovimab | LY1404 | III | 26.44 | 65.08 | 22.33 | 25.43 | 5.9 | 16.05 | 16.92 |

| | | Omicron Sublineages | | | | |
|---|---|---|---|---|---|---|
| | | BF.7 | BA.2.75.2 | | BQ 1.1 | |
| | | (R346T, F486V) | (R346T, F486S) | | (R346T, K444T, F486V) | |
| Name | Antibody | IC80 | IC50 | IC80 | IC50 | IC80 |
| Bi-specific | MX828 | 1423.99 | 2464.9 | 7944.2 | 374.76 | 1125.06 |
| | MX829 | 22.17 | >10,000 | >10,000 | 1923.25 | 8867.36 |
| | MX828 + MX829 | 22.45 | 8521.96 | >10,000 | 537.73 | 1968.78 |
| | MX830 | 4381.87 | 7054.01 | >10,000 | 629.41 | 2709.82 |
| | MX831 | 21.68 | >10,000 | >10,000 | 4213.88 | >10,000 |
| | MX830 + MX831 | 24.82 | 3709.91 | 9721.44 | 421.55 | 3821.38 |
| | MX492 | >10,000 | 6063.34 | >10,000 | >10,000 | >10,000 |
| | MX413 | 177.41 | >10,000 | >10,000 | >10,000 | >10,000 |
| | MX492 + MX413 | 253.87 | 2482.17 | 5527.97 | >10,000 | >10,000 |
| bebtelovimab | LY1404 | 25.2 | 4.98 | 20.22 | >10,000 | >10,000 |

[1110] Table 10 shows the IC50 and IC80 values (in nM) of MX834, MX837, MX835 and MX838 tetravalent, trispecific antibodies for neutralization of the SARS-CoV-2 variants, Delta (B.1.617.2) and Omicron (B.1.1.529, BA.2, BA.2.12.1, BA.4/5 and BA.1.1 (R346K)). IC50 and IC80 values for MX500 and MX501 are also shown for comparison. The tetravalent, trispecific antibodies potently inhibited the SARS-CoV-2 variants.

TABLE 10

| | | | Delta | | Omicron | | Omicron Sublineages | | | | | | | |
|---|---|---|---|---|---|---|---|---|---|---|---|---|---|---|
| | | | B.1.617.2 | | B.1.1.529 | | BA.2 | | BA.2.12.1 | | BA.4/5 | | BA.1.1 (R346K) | |
| Name | Antibody | Class | IC50 | IC80 | IC50 | IC80 | IC50 | IC80 | IC50 | IC80 | IC50 | IC80 | IC50 | IC80 |
| Tri-specific | MX834 | I + II + III | 7.32 | 11.26 | 1.4 | 6.58 | 3.17 | 26.03 | 4.62 | 12.06 | 12.5 | 29.95 | 1.6 | 3.92 |
| | MX837 | I + II + III | 10.29 | 11.26 | 2.23 | 4.45 | 2.06 | 7.07 | 5.76 | 17.54 | 5.93 | 17.45 | 9.72 | 11.4 |
| | MX835 | I + II + III | 7.96 | 34.94 | 1.43 | 4.85 | 3.22 | 17.09 | 3.06 | 13.38 | 8.32 | 27.35 | 6.52 | 11.71 |
| | MX838 | I + II + III | 36.41 | 39.93 | 4.3 | 9.1 | 3.82 | 23.84 | 6.01 | 18.4 | 7.84 | 16.02 | 1.17 | 3.23 |
| | MX500 | I + II + III | 4.53 | 10.72 | 6.07 | 30.83 | 1.59 | 10.09 | 16.57 | 84.93 | 1034.11 | 2370.06 | 45.11 | 83.38 |
| | MX501 | I + II + III | 4.82 | 5.44 | 7.19 | 23.15 | 1.66 | 11.67 | 17.12 | 51.02 | 85.24 | 606.61 | 20.49 | 77.18 |

[1111] Table 11 shows the IC50 and IC80 values (in nM) of MX834, MX837, MX835 and MX838 tetravalent, trispecific antibodies for neutralization of the SARS-CoV-2 variants, Omicron BA.1.1 (R346K), BA.4.6 (R346T, F486V), BA.4.7 (R346S, F486V), BF.7 (R346T, F486V), BA.2.75.2 (R346T, F486S), and BQ.1.1 (R346T, K444T, F486V). MX500, MX501 and bebtelovimab (LY1404) were also tested for comparison. The tetravalent, trispecific antibodies potently inhibited the SARS-CoV-2 variants.

TABLE 11

| | | | Omicron Sublineages | | | | | | |
|---|---|---|---|---|---|---|---|---|---|
| | | | BA.1.1 | | BA.4.6 | | BA.4.7 | | BF.7 |
| | | | (R346K) | | (R346T, F486V) | | (R346S, F486V) | | (R346T, F486V) |
| Name | Antibody | Class | IC50 | IC80 | IC50 | IC80 | IC50 | IC80 | IC50 |
| Tri-specific | MX834 | I + II + III | 1.6 | 3.92 | 68.44 | 174.43 | 39.67 | 186.99 | 65.91 |
| | MX837 | I + II + III | 9.72 | 11.4 | 32.92 | 95.5 | 4.19 | 27.91 | 40.46 |
| | MX835 | I + II + III | 6.52 | 11.71 | 71.14 | 178.67 | 40.95 | 216.03 | 61.42 |
| | MX838 | I + II + III | 1.17 | 3.23 | 38.83 | 115.19 | 11.69 | 46.49 | 27.1 |
| | MX500 | I + II + III | 45.11 | 83.38 | >10,000 | >10,000 | >10,000 | >10,000 | >10,000 |
| | MX501 | I + II + III | 20.49 | 77.18 | >10,000 | >10,000 | >10,000 | >10,000 | >10,000 |
| bebtelovimab | LY1404 | III | 26.44 | 65.08 | 11.5 | 28.15 | 11.44 | 22.45 | 8.51 |

| | | Omicron Sublineages | | | | |
|---|---|---|---|---|---|---|
| | | BF.7 | BA.2.75.2 | | BQ 1.1 | |
| | | (R346T, F486V) | (R346T, F486S) | | (R346T, K444T, F486V) | |
| Name | Antibody | IC80 | IC50 | IC80 | IC50 | IC80 |
| Tri-specific | MX834 | 244.45 | >10,000 | >10,000 | 5122.91 | >10,000 |
| | MX837 | 125.47 | >10,000 | >10,000 | 4108.69 | 4625.22 |
| | MX835 | 281.82 | >10,000 | >10,000 | 4243.71 | >10,000 |
| | MX838 | 132.16 | >10,000 | >10,000 | 5832.55 | >10,000 |
| | MX500 | >10,000 | >10,000 | >10,000 | >10,000 | >10,000 |
| | MX501 | >10,000 | >10,000 | >10,000 | >10,000 | >10,000 |
| bebtelovimab | LY1404 | 24.54 | 5.67 | 20.72 | >10,000 | >10,000 |

[1112] Table 12 shows the IC50 and IC80 values (in nM) of MX834, MX835, MX837 and MX838 tetravalent, trispecific antibodies, and MX828 and MX829 tetravalent, bispecific antibodies for neutralization of the SARS-CoV-2 variants, D614G, BA. 1, BA.4/5 (F486V), BA.4.6 (R346T, F486V), BA.2.75 (G446S), BA.2.75.2 (R346T, G446S, F486S), BQ.1.1 (R346T, K44T, F486V) and BJ.1 (R346T, V445P, G446S). MX500, MX501, MX492, MX413, B10, B11, 58H/182L, 58.1LC_94GLTG, 58.1LC_93VGLTG, 46.1, 61.1 and bebtelovimab (LY1404) were also tested for comparison. In addition, combinations of MX828 and MX829 (MX828+829), MX830 and MX831 (MX830+831), and MX492 and MX413 (MX492+413) were also tested. The tetravalent, trispecific and tetravalent, bispecific antibodies potently inhibited the SARS-CoV-2 variants.

TABLE 12

| | | | | Omicron Sublineages | | | | | |
|---|---|---|---|---|---|---|---|---|---|
| | | | | | | BA.4/5 | | BA.4.6 | |
| | | D614G | | BA.1 | | (F486V) | | (R346T, F486V) | |
| ID | Class | IC50 | IC80 | IC50 | IC80 | IC50 | IC80 | IC50 | IC80 |
| MX834 | I + II + III | 1 | 8 | 2 | 8 | 9 | 35 | 24 | 109 |
| MX835 | I + II + III | 2 | 8 | 2 | 8 | 8 | 30 | 19 | 92 |
| MX837 | I + II + III | 2 | 9 | 2 | 7 | 9 | 17 | 33 | 80 |
| MX838 | I + II + III | 3 | 14 | 1 | 4 | 9 | 18 | 23 | 104 |
| MX500 | I + II + III | 0 | 2 | 5 | 24 | 400 | 2583 | 3440 | >10,000 |
| MX501 | I + II + III | 1 | 5 | 2 | 11 | 203 | 1202 | 2017 | 3120 |
| MX828 | I + II | 4 | 9 | 1 | 3 | 86 | 438 | 54 | 300 |
| MX829 | I + III | 3 | 5 | 14 | 43 | 2 | 4 | 4 | 13 |
| MX828 + 829 | I + II + III | 3 | 4 | 2 | 4 | 2 | 6 | 5 | 10 |
| MX830 | I + II | 5 | 9 | 1 | 3 | 260 | 1565 | 138 | 514 |
| MX831 | I + III | 3 | 5 | 7 | 25 | 2 | 4 | 3 | 10 |
| MX830 + 831 | I + II + III | 2 | 4 | 2 | 3 | 2 | 4 | 4 | 12 |
| MX492 | I + II | 5 | 8 | 1 | 3 | >10,000 | >10,000 | >10,000 | >10,000 |
| MX413 | I + III | 3 | 4 | 1294 | 6545 | 4 | 8 | 10 | 25 |
| MX492 + 413 | I + II + III | 2 | 3 | 2 | 4 | 4 | 11 | 12 | 31 |
| B10 | I + III | 3 | 11 | 3 | 12 | 5 | 16 | 9 | 83 |
| B11 | I + III | 4 | 12 | 5 | 21 | 6 | 17 | 14 | 91 |
| 58H/182L | I | >10,000 | >10,000 | 53 | 90 | >10,000 | >10,000 | >10,000 | >10,000 |
| 58.1LC_94GLTG | I | 0 | 3 | 2 | 8 | 5 | 20 | 2 | 10 |
| 58.1LC_93VGLTG | I | 0 | 2 | 1 | 9 | 4 | 21 | 1 | 9 |
| 46.1 | II | >10,000 | >10,000 | 77 | 211 | >10,000 | >10,000 | >10,000 | >10,000 |
| 61.1 | III | >10,000 | >10,000 | >10,000 | >10,000 | 19 | 31 | 540 | 2170 |
| LY1404 | III | 0 | 1 | 1 | 7 | 0 | 1 | 0 | 1 |

| | Omicron Sublineages | | | | | | | |
|---|---|---|---|---|---|---|---|---|
| | BA.2.75 | | BA.2.75.2 | | BQ.1.1 | | BJ.1 | |
| | (G446S) | | (R346T, G446S, F486S) | | (R346T, K444T, F486V) | | (R346T, V445P, G446S) | |
| ID | IC50 | IC80 | IC50 | IC80 | IC50 | IC80 | IC50 | IC80 |
| MX834 | 1 | 2 | >10,000 | >10,000 | 1001 | 4056 | 3 | 87 |
| MX835 | 1 | 2 | >10,000 | >10,000 | 369 | 1624 | 2 | 23 |
| MX837 | 1 | 3 | >10,000 | >10,000 | 1444 | 5629 | 15 | 97 |
| MX838 | 1 | 3 | >10,000 | >10,000 | 2375 | 7000 | 18 | 85 |
| MX500 | 1 | 2 | 4127 | >10,000 | >10,000 | >10,000 | 172 | 2641 |
| MX501 | 1 | 7 | 6716 | >10,000 | >10,000 | >10,000 | 421 | 2004 |
| MX828 | 1 | 4 | 781 | 2757 | 164.38 | 663 | 7 | 37 |
| MX829 | 1 | 3 | >10,000 | >10,000 | 1115 | 2591 | 16 | 113 |
| MX828 + 829 | 0 | 1 | 1378 | 3219 | 91 | 588 | 5 | 20 |
| MX830 | 1 | 4 | 1261 | 5887 | 359 | 1300 | 3 | 24 |
| MX831 | 1 | 2 | >10,000 | >10,000 | 1485 | 6704 | 40 | 169 |
| MX830 + 831 | 1 | 2 | 2157 | 6030 | 261 | 878 | 6 | 29 |
| MX492 | 3 | 10 | 1627 | 6735 | >10,000 | >10,000 | 783 | 2011 |
| MX413 | 21 | 71 | >10,000 | >10,000 | >10,000 | >10,000 | 3208 | >10,000 |
| MX492 + 413 | 3 | 6 | 2094 | 4558 | >10,000 | >10,000 | 718.9 | 3207 |
| B10 | 1 | 2 | >10,000 | >10,000 | 206 | 603 | 12 | 39 |
| B11 | 1 | 2 | >10,000 | >10,000 | 342 | 1534 | 3 | 41 |
| 58H/182L | 5 | 35 | >10,000 | >10,000 | >10,000 | >10,000 | 20 | 102 |
| 58.1LC_94GLTG | 0 | 1 | >10,000 | >10,000 | 12 | 38 | 1 | 7 |
| 58.1LC_93VGLTG | 0 | 1 | >10,000 | >10,000 | 7 | 28 | 0 | 2 |
| 46.1 | 148 | 352 | 386 | 1111 | >10,000 | >10,000 | >10,000 | >10,000 |
| 61.1 | >10,000 | >10,000 | >10,000 | >10,000 | >10,000 | >10,000 | >10,000 | >10,000 |
| LY1404 | 13 | 86 | 2 | 7 | >10,000 | >10,000 | >10,000 | >10,000 |

### Example 3

### Half-Life Analysis

[1113] The half-life of tetravalent bispecific antibody MX413 (A19-61×A23-58H/1B1-182L, containing a Fc mutation to extend half-life) was determined using a mouse model. Tg32-hFc mice (B6.Cg-Tg(FCGRT)32Dcr FcgrttmlDer Ighglem2(IGHG1)Mvw/MvwJ, strain #029686) between the ages of 6-12 weeks were obtained from The Jackson Laboratory (Bar Harbor, ME). On Day 0, all mice were treated with intravenous (IV) injection of MX413, parental B1-182.1 or VRC01LS antibody at a dose of 5 mg/kg. In-life blood and serum collections in ethylenediaminetetraacetic acid (EDTA) were conducted on Days −7, 0, 1, 2, 5, 7, 11, 14, 21, 28, 35, 42, and 49. All mice had maximum bleeds conducted on Day 56 and were then euthanized. Antibody concentration in serum was measured by quantitative ELISA using SARS-CoV-2 spike protein-coated microtiter plates and a horseradish peroxidase (IRP)-conjugated anti-human IgG antibody.

[1114] FIG. 7 shows serum antibody levels following treatment. These data show that MX413 had a similar half-life to VRC01 LS, representing a half-life of greater than 70 days in human.

### Example 4

### Tetravalent Trispecific Antibody Protects Syrian Hamsters from SARS-CoV-2 Variants

[1115] The tetravalent trispecific antibody, 46.1-182.1v/61.1-182.1v (MX501; SEQ ID NOs:112, 113, 148 and 149) was tested in an in vivo passive challenge study to determine its capacity to protect Syrian golden hamsters from infection by Omicron variants BA.1, BA.2 or BA.5. MX501 contains single Fv46 and Fv61 domains and two Fv182v domains (FIG. 3H). Fv182v is a stabilized variant of Fv182. MX501 showed similar breadth and potency to 61.1/46.1-182.1 (LY-CoV555), as shown below in Table 13.

TABLE 13
MX501 (46.1-182.1v/61.1-182.1v) is a Potently Neutralizing Tetravalent Trispecific Antibody

| | B.1.1.7 | | BA.1 | | BA.2 | | BA.4/5 | |
|---|---|---|---|---|---|---|---|---|
| | IC50 | IC80 | IC50 | IC80 | IC50 | IC80 | IC50 | IC80 |
| LY-CoV555 | 14.5 | 36.1 | >67,000 | >67,000 | >67,000 | >67,000 | >67,000 | >67,000 |
| 46.1-182.1v/61.1-182.1v | 18.7 | 71.0 | 28.5 | 87.6 | 9.7 | 25.0 | 1839 | 4366 |

Neutralization is shown in pM.

[1116] For the passive challenge study, all experiments were conducted according to the National Institutes of Health (NIH) regulations and standards on the humane care and use of laboratory animals, as well as the Animal Care and Use Committees of Bioqual, Inc. (Rockville, Maryland). Six- to eight-week-old male Syrian hamsters (Envigo) were housed at Bioqual, Inc. Multispecific antibody was diluted into phosphate buffered saline (PBS) to achieve a dose of 10 mg/kg in a 1-2 mL volume and passively transferred to the hamsters by injection into the peritoneal cavity 24 hours prior to challenge. Hamsters were infected with SARS-CoV-2 variants by injecting 100 μL of virus diluted in PBS into the nares, split between both nostrils. Weight changes and clinical observations were collected daily for all studies. Four hamsters per group were euthanized at days 2, 4, 6 and 10 to collect lungs for quantification of viral load.

[1117] The BA.1 SARS-CoV-2 variant used in this study was described in Gagne, M. et al., Cell 185, 1556-1571.e18 (2022) and Gagne, M. et al., Cell 185, 113-130.e15 (2022). The BA.2 SARS-CoV-2 variant was obtained from the Biodefense and Emerging Infections Research Resources Repository (BEI, NR-56522). The BA.5 SARS-CoV-2 variant was propagated by the laboratory of Mehul S. Suthar in Vero-TMPRSS2 cells. Sequence was confirmed prior to challenge studies. All SARS-CoV-2 stocks were titrated in hamsters to confirm pathogenicity prior to use.

[1118] For TCID50 quantification of SARS-CoV-2, tissues were weighed, placed into pre-labeled Sarstedt cryovials, and snap-frozen until needed. Prior to testing, tissues were thawed and homogenized using a hand-held tissue homogenizer. Samples were spun down to remove debris and supernatants were assayed. TCID50 was quantified by incubating Vero-TMPRSS2 cells at 37° C., 5% CO₂ overnight. The following day, the medium was aspirated and replaced with fresh medium. Samples were serially diluted ten-fold for quantification. Positive (virus stock of known infectious titer in the assay) and negative (medium only) control wells were included in every assay. The plates were incubated at 37° C., 5.0% CO₂ for 4 days. The cell monolayers were visually inspected for cytopathic effect. TCID50 values were calculated using the Reed-Muench formula. TCID50 values were log transformed prior to statistical analysis.

[1119] FIG. 8A shows a diagram of the passive transfer challenge study. Specifically, MX501 (46.1-182.1v/61.1-182.1v) was passively transferred to Syrian hamsters intraperitoneally 24 hours prior to challenge with either 1×10⁵ plaque-forming units (PFU) of BA.1, 2×10⁴ PFU of BA.2, or 1×10⁵ PFU of BA.5 SARS-CoV-2 Omicron variants. For each virus, an additional group of hamsters received an equal volume of PBS in the same manner and served as controls. All animals were weighed daily to monitor weight loss and 4 animals per group were euthanized at days 2, 4, 6, and 10 to assess viral loads in the lung and nares. Hamsters were monitored daily for weight loss over 10 days, and viral load in the lung and nares was also quantified by TCID50 per gram.

[1120] For BA.1-infected hamsters, MX501-treated animals continued to gain weight throughout the study, whereas PBS-treated animals lost weight from days 5-7 before recovering and regaining weight (FIG. 8B). Also, while PBS treated animals show >7-logs of lung viral load per gram (TCID50/g) up until day 4, antibody-treated animals had very low to undetectable lung viral load in the assay (FIG. 8C). For BA.2- and BA.5-infected hamsters, a 7-10% weight loss was observed on day 6 in PBS-treated animals, and an absence of weight loss in animals that received antibody (FIGS. 8E and 8H). Similar to BA.1, the viral titer for BA.2 was >7-logs of lung viral load per gram on days 2 and 4 in PBS-treated animals and no virus growth was observed in the lungs of treated animals (FIG. 8F). For BA.5, viral titer exceeded 8-logs on day 2 and antibody-treated animals showed a significant 13-fold lower lung viral load on day 4 relative to PBS treated animals (FIG. 8I).

[1121] In addition, while lung infection and weight loss are relevant for systemic disease, clearance of virus from the nares may be correlated with decreases in virus transmission. Viral loads in the nares of PBS-treated animals noted a peak average viral load 1.4×10⁶ per gram of tissue (TCID50/g) that occurred on day 2 and that virus did not clear until after day 6 in half the animals (FIG. 8D). In antibody-treated animals, low viral loads were present in treated animals until day 6 (FIG. 8D). This is consistent with other studies that showed the clearance of virus from the nares is more difficult than the lungs.

[1122] In the nares, PBS-treated hamsters had a peak viral load average, 1.5×10⁷ TCID50/g, that occurred on day 2 of infection and was a log higher than BA.1 (FIG. 8G). Despite the higher peak viral load in untreated animals, the antibody-treated animals had low viral loads similar to BA.1 on days 2 and 4, and had no virus growth staring on day 6 (FIG. 8G). And, in the nares, the average peak viral load was 5.0×10⁸, occurred on day 2 and was 10 to 100-fold higher than that seen with BA.1- and BA.2-infected hamsters. BA.5 virus growth in the nares on average lasted longer than BA.1 and BA.2 (FIG. 8J), suggesting it was more difficult for untreated animals to clear BA.5 infection from the nares. In antibody-treated animals, no significant difference was noted between the antibody and PBS control group.

[1123] Together, these data show that MX501 (46.1-182.1v/61.1-182.1v) has breadth, potency and in vivo protective efficacy against lower respiratory tract disease caused by Omicron and Omicron sublineages with distinct amino acid substitutions that mediate escape from therapeutic antibodies.

### Example 5

### SARS-CoV-2 Escape Potential by Multispecific Antibodies

[1124] FIG. 9 shows two configurations of trispecific, trivalent cross-over dual variable (CODV) antibodies made utilizing variable fragments (Fv) from B1-182.1 (“182.1”, dotted; light chain=lighter shading; heavy chain=darker shading), the anti-SARS-CoV-2 antibody, A19-46.1 (“46.1”, striped; light chain=lighter shading; heavy chain=darker shading) and A19-61.1 (“61.1”, grid; light chain=lighter shading; heavy chain=darker shading). The two configurations, 46.1/61.1-182.1 and 61.1/46.1-182.1, correspond to SEQ ID NOs:150-157 and SEQ ID NOs:158-165, respectively.

[1125] After design of the amino acid sequences for each multispecific antibody, the four genes for each multispecific antibody were synthesized using human preferred codons (GenScript) and cloned into eukaryotic expression vectors. For each multispecific antibody expression, equal amounts of the 4 plasmid DNAs were transfected into Expi293 cells (Life Technology) using Expi293 transfection reagent (Life Technology) as previously reported (DOI: 10.1126/science.aan8630). The transfected cells were cultured in a shaker incubator at 120 rpm, 37° C., 9% CO₂ for 4-5 days.

[1126] Culture supernatants were harvested and filtered, the multispecific antibodies were purified over a Protein A (GE Health Science) column. Each multispecific antibody was eluted with IgG elution buffer (Pierce), immediately buffer exchanged with phosphate buffered saline (PBS) and concentrated using Centricon Plus-70 (Millipore Sigma) membrane filter unit. After concentration, each multispecific antibody was applied to a Superdex 200 16/600 size exclusion column (Cytiva) to remove aggregates and different species in the preparation. The fractions were then analyzed on reduced and non-reduced SDS-PAGE to identify the fractions that contained the monomeric multispecific antibody before combining them. The pooled fractions were then further concentrated, aliquoted and analyzed by SDS-PAGE as well as an analytical SEC column (Superdex 200 16/600) to verify purity.

[1127] The escape potential of the multispecific antibodies was assessed using an rcVSV antibody escape assay. Selection of virus escape variants was conducted as previously described by Wang et al., Science, 373:1-15 (2021). Briefly, replication competent VSV (rcVSV) bearing SARS-CoV-2 WA-1 spike protein were incubated with the indicated antibodies at 5-fold increasing concentrations (34×10⁻³ to 333,333 μM). Vero cells in 12-well plates were infected with virus-antibody mixture to allow viral replication given selective pressure from antibodies. Three days after infection, wells were assessed for significant viral growth, as indicated by the presence of >20% CPE. Supernatant from the well showing significant viral growth at the highest antibody concentration was passaged forward onto fresh cells and antibody containing media. Shown for each antibody is the maximum concentration with >20% CPE that was passaged forward in each round of selection. Once significant viral growth appeared at 333,333 μM, supernatant was no longer passaged forward, and generation of escape variants was considered fixed. Three independent experiments were carried out, and compared to mAb LY-COV1404.

[1128] FIG. 10 shows SARS-CoV-2 escape potential by monospecific antibodies (B1-182.1), a combination of monospecific antibodies (B1-182.1+A19-61.1+A19-46.1), and multispecific antibodies (46.1/61.1-182.1 and 61.1/46.1-182.1). Shown for each antibody is the maximum concentration with >20% CPE that was passaged forward in each round of selection. Once significant viral growth appeared at 333,333 μM, supernatant was no longer passaged forward, and generation of escape variants was considered fixed.

[1129] These results show that the candidate multispecific antibodies mitigated immune escape observed with single antibodies and combinations of single antibodies.

### Example 6

### Pseudovirus Neutralization Assay

[1130] Additional multispecific antibodies were prepared using the methods of Example 1, having the structures shown in FIGS. 12A-12F, FIGS. 13A-13F, FIGS. 14A-14L, FIGS. 15A-15F, FIGS. 16A-16L, FIGS. 17A-17E and FIGS. 18A-18L. The pseudotyped neutralization potency (IC50 and IC80) of these antibodies was then determined using the methods described in Example 2.

[1131] Table 14 shows the IC50 and IC80 values (in nM) of the indicated molecules, or combination of molecules, for neutralization of Omicron sublineages BA.4/5, BQ.1, BQ.1.1, BA.2.75.2, XBB, XBB1.5 and BF.7.

TABLE 14

| | | Omicron Sublineages | | | | | | |
|---|---|---|---|---|---|---|---|---|
| | | BA.4/5 | | BQ 1 | | BQ 1.1 | | BA.2.75.2 |
| ID | Class | IC50 | IC80 | IC50 | IC80 | IC50 | IC80 | IC50 |
| MX1042 | I + III | 1.37 | 2.75 | 11.89 | 27.37 | 0.29 | 3.5 | 0.01 |
| MX1043 | I + II | 3.74 | 10.69 | 2.64 | 15.09 | 2.35 | 12.29 | 2.06 |
| MX1069 | I + II + III | 1.47 | 2.44 | 0.83 | 3.07 | 1.89 | 6.5 | 1.81 |
| MX1055 | I + II + III | 1.3 | 3.32 | 15.98 | 60.59 | 0.12 | 3.41 | 2.32 |
| MX1089 | I + II + III | 2.32 | 3.5 | 2.92 | 7.27 | 1.99 | 7.9 | 7.16 |
| E12 | I | 4.62 | 9.21 | 11.89 | 40.91 | 5.29 | 17.43 | 6.99 |
| B8 | I | 6.97 | 14.76 | 15.02 | 49.64 | 4.57 | 21.67 | 12.18 |
| A58VGLTG | I | 5.2 | 13.5 | 23.53 | 87.67 | 30.29 | 1316 | >10,000 |
| A46 | II | >10,000 | >10,000 | n.t. | n.t. | 386 | 1111 | >10,000 |
| E8 | III | 0.13 | 0.49 | 124 | 5191 | 496 | 1803 | 1.72 |
| LY1404 | III | 1.88 | 3.74 | n.t. | n.t. | >10,000 | >10,000 | 5.67 |
| A46 + E12 | I + II | 1.96 | 4.26 | 2.27 | 6.63 | 1.65 | 5.09 | 2.36 |
| E8 + E12 | I + III | 0.4 | 0.78 | 0.89 | 3.27 | 1.77 | 4.52 | 0.01 |
| A46 + E12 + B8 | I + II | n.t. | n.t. | n.t. | n.t. | n.t. | n.t. | n.t. |
| A46 + E12 + B8 + E8 | I + II + III | 1.36 | 5.82 | 1.69 | 15.69 | 8.10 | 19.17 | 1.47 |
| A46 + E8 + B8 | I + II + III | n.t. | n.t. | 16.03 | 52.16 | 11.14 | 17.02 | n.t. |
| A46 + E12 + E8 | I + II + III | n.t. | n.t. | n.t. | n.t. | n.t. | n.t. | n.t. |
| A46 + E12 + B8 + A58VGLTG | I + II + III | n.t. | n.t. | n.t. | n.t. | n.t. | n.t. | n.t. |
| A46 + E12 + E8 + A58VGLTG | I + II + III | n.t. | n.t. | n.t. | n.t. | n.t. | n.t. | n.t. |

| | Omicron Sublineages | | | | | | |
|---|---|---|---|---|---|---|---|
| | BA.2.75.2 | XBB | | XBB1.5 | | BF.7 | |
| ID | IC80 | IC50 | IC80 | IC50 | IC80 | IC50 | IC80 |
| MX1042 | 0.05 | 7.55 | 16.54 | 41.79 | 81.52 | 19.28 | 30.78 |
| MX1043 | 4.01 | 2.17 | 7.05 | 68.73 | 154.8 | 56.9 | 133.6 |
| MX1069 | 3.33 | 2.48 | 5.2 | 34.78 | 65.45 | 12.48 | 28.99 |
| MX1055 | 7.23 | 8.39 | 32.74 | 23.65 | 67.92 | 16.16 | 28.24 |
| MX1089 | 7.84 | 10.68 | 28.51 | 52.27 | 148.1 | 22.61 | 64.28 |
| E12 | 40.08 | 12.65 | 31.11 | 61.71 | 183.2 | 28.33 | 88.66 |
| B8 | 27.41 | 13.44 | 47.18 | 43.46 | 142.6 | 19.83 | 63.04 |
| A58VGLTG | >10,000 | >10,000 | >10,000 | >10,000 | >10,000 | 97.46 | 474.8 |
| A46 | >10,000 | n.t. | n.t. | >10,000 | >10,000 | 5296 | >10,000 |
| E8 | 5.9 | 61.5 | 705 | 284.4 | 318.8 | 15.56 | 30.92 |
| LY1404 | 20.72 | >10,000 | >10,000 | >10,000 | >10,000 | 3.28 | 26.94 |
| A46 + E12 | 4.68 | 2.76 | 9.01 | 57.75 | 126.9 | 38.27 | 67.65 |
| E8 + E12 | 0.05 | 2.96 | 7.82 | 17.89 | 86.65 | 11.38 | 47.97 |
| A46 + E12 + B8 | n.t. | n.t. | n.t. | 12 | 32.95 | 12.94 | 33.75 |
| A46 + E12 + B8 + E8 | 6.93 | 5.95 | 16.58 | n.t. | n.t. | n.t. | n.t. |
| A46 + E8 + B8 | n.t. | 11.29 | 17.7 | n.t. | n.t. | n.t. | n.t. |
| A46 + E12 + E8 | n.t. | n.t. | n.t. | 37.82 | 96.65 | 12.04 | 30.6 |
| A46 + E12 + B8 + A58VGLTG | n.t. | n.t. | n.t. | 15.28 | 30.59 | 17.35 | 20.02 |
| A46 + E12 + E8 + A58VGLTG | n.t. | n.t. | n.t. | 20.85 | 49.66 | 3.57 | 15.52 |

[1132] FIG. 19 shows the IC50 values (in nM) of the indicated molecules for neutralization of Omicron sublineages BA.1, BA.4/5, BA.2.12.1, BA.2.75, BA.4.6, BA.2.75.2, BQ.1.1, BJ.1 and XBB.

[1133] FIG. 20 shows the IC50 values (in nM) of the indicated molecules for neutralization of Omicron sublineages BA.4/5, BQ.1, BQ.1.1, BA.2.75.2 and XBB.

[1134] FIG. 21 shows the IC50 values (in nM) of the indicated molecules for neutralization of Omicron sublineages BA.4/5, BQ.1, BQ.1.1, BA.2.75.2 and XBB.

[1135] These results show that the tested molecules potently inhibited the Omicron variants, and to a much greater extent than bebtelovimab (LY1404).

### Example 7

### Pseudovirus Neutralization Assay

[1136] Additional multispecific antibodies were prepared using the methods of Example 1, having the structures shown in FIGS. 12A-12F, FIGS. 13A-13F, FIGS. 14A-14L, FIGS. 15A-15F, FIGS. 16A-16L, FIGS. 17A-17E and FIGS. 18A-18L. The pseudotyped neutralization potency (IC50 and IC80) of these antibodies was then determined using the methods described in Example 2.

[1137] Table 15 shows the IC50 and IC80 values (in ng/mL) of the indicated molecules, or combination of molecules, for neutralization of Omicron sublineages BA.4/5, BQ.1, BQ.1.1, BA.2.75.2, XBB, XBB1.5 and CH.1.1. The constructs tested included MX1054 (SEQ ID NOs:345, 347; 346, 348); MX1062 (SEQ ID NOs:349, 351; 350, 352); MX1063 (SEQ ID NOs:353, 355; 354, 356); MX1064 (SEQ ID NOs:357, 359; 358, 360); MX1065 (SEQ ID NOs:361, 363; 362, 364); MX1066 (SEQ ID NOs:365, 367; 366, 368); MX1067 (SEQ ID NOs:369, 371; 370, 372); MX1068 (SEQ ID NOs:373, 375; 374, 376); MX1055 (SEQ ID NOs:377, 379; 378, 380); MX1056 (SEQ ID NOs:381, 383; 382, 384); MX1057 (SEQ ID NOs:385, 387; 386, 388); and MX1058 (SEQ ID NOs:389, 391; 390, 392). These results show that the tested molecules potently inhibited the Omicron variants.

TABLE 15

| | | BA.4/5 | | BQ 1 | | BQ 1.1 | |
|---|---|---|---|---|---|---|---|
| ID | Class | IC50 | IC80 | IC50 | IC80 | IC50 | IC80 |
| MX1054 | I + II + III | 9.55 | 47.17 | 25.04 | 53.53 | 20.46 | 38.56 |
| MX1062 | I + II + III | 15.85 | 21.57 | 17.91 | 92.37 | 17.82 | 20.45 |
| MX1063 | I + II + III | 5.02 | 26.70 | 14.29 | 56.14 | 22.76 | 55.07 |
| MX1064 | I + II + III | 5.74 | 17.75 | 15.57 | 42.90 | 12.99 | 32.57 |
| MX1065 | I + II + III | n.t. | n.t. | 33.55 | 86.03 | 13.96 | 20.63 |
| MX1066 | I + II + III | n.t. | n.t. | 35.88 | 41.31 | 28.36 | 30.75 |
| MX1067 | I + II + III | 15.80 | 53.06 | 64.46 | 73.21 | 36.00 | 79.62 |
| MX1068 | I + II + III | 11.31 | 29.49 | 37.91 | 116.50 | 63.96 | 226.00 |
| MX1055 | I + II + III | 1.3 | 3.32 | 15.98 | 60.59 | 0.12 | 3.41 |
| MX1056 | I + II + III | 4.12 | 5.89 | 12.99 | 36.78 | 5.84 | 41.86 |
| MX1057 | I + II + III | 4.04 | 7.42 | 8.3 | 23.63 | 12.32 | 56.1 |
| MX1058 | I + II + III | 2.74 | 5.51 | 16 | 31.98 | 4.49 | 28.48 |
| A19-46 + E8 + B8 | I + II + III | n.t. | n.t. | 16.03 | 52.16 | 11.14 | 17.02 |
| B8 | I | 6.97 | 14.76 | 15.02 | 49.64 | 4.57 | 21.67 |
| E12 | I | 4.62 | 9.21 | 11.89 | 40.91 | 5.29 | 17.43 |
| E8 | III | 0.13 | 0.49 | 124 | 5191 | 496 | 1803 |
| A19-46 + E8 + B8 | II | >10,000 | >10,000 | n.t. | n.t. | 386 | 1111 |

| | BA.2.75.2 | | XBB | | XBB1.5 | | CH.1.1 | |
|---|---|---|---|---|---|---|---|---|
| ID | IC50 | IC80 | IC50 | IC80 | IC50 | IC80 | IC50 | IC80 |
| MX1054 | 13.12 | 35.44 | 17.66 | 29.87 | n.t. | n.t. | n.t. | n.t. |
| MX1062 | 16.18 | 34.50 | 18.28 | 39.26 | n.t. | n.t. | n.t. | n.t. |
| MX1063 | 8.41 | 21.04 | 6.62 | 18.10 | n.t. | n.t. | n.t. | n.t. |
| MX1064 | 14.39 | 35.12 | 6.12 | 24.72 | n.t. | n.t. | n.t. | n.t. |
| MX1065 | n.t. | n.t. | 12.5 | 16.74 | n.t. | n.t. | n.t. | n.t. |
| MX1066 | n.t. | n.t. | 28.74 | 29.75 | n.t. | n.t. | n.t. | n.t. |
| MX1067 | 4.34 | 10.72 | 26.34 | 74.07 | n.t. | n.t. | n.t. | n.t. |
| MX1068 | 7.60 | 25.00 | 15.16 | 46.85 | n.t. | n.t. | n.t. | n.t. |
| MX1055 | 2.32 | 7.23 | 8.39 | 32.74 | 23.65 | 67.92 | 125 | 862 |
| MX1056 | 2.53 | 9.92 | 7.13 | 23.63 | n.t. | n.t. | n.t. | n.t. |
| MX1057 | 1.27 | 3.79 | 6.39 | 35.53 | n.t. | n.t. | n.t. | n.t. |
| MX1058 | 4.03 | 10.02 | 14.16 | 31.79 | n.t. | n.t. | n.t. | n.t. |
| A19-46 + E8 + B8 | n.t. | n.t. | 11.29 | 17.7 | n.t. | n.t. | n.t. | n.t. |
| B8 | 12.18 | 27.41 | 13.44 | 47.18 | n.t. | n.t. | n.t. | n.t. |
| E12 | 6.99 | 40.08 | 12.65 | 31.11 | n.t. | n.t. | n.t. | n.t. |
| E8 | 1.72 | 5.9 | 61.5 | 705 | n.t. | n.t. | n.t. | n.t. |
| A19-46 + E8 + B8 | >10,000 | >10,000 | n.t. | n.t. | n.t. | n.t. | n.t. | n.t. |

Unit: ng/ml

[1138] Table 16 shows the IC50 and IC80 values (in ng/mL) of the indicated molecules, or combination of molecules, for neutralization of the original Wuhan strain (WA1), D614G spike protein mutant (D614G), Delta variant, and Omicron variants B.1.1.529, BA.4.6 and BF.7. These results show that the tested molecules potently inhibited the tested viruses.

TABLE 16

| | | | | | | | | BA.1.1.529 | | | | | |
|---|---|---|---|---|---|---|---|---|---|---|---|---|---|
| | | WA1 | | D614G | | Delta | | (Omicron) | | BA.4.6 | | BF.7 | |
| ID | Class | IC50 | IC80 | IC50 | IC80 | IC50 | IC80 | IC50 | IC80 | IC50 | IC80 | IC50 | IC80 |
| MX1054 | I + II + III | 15.84 | 66.29 | 13.83 | 30.95 | 6.08 | 57.02 | 2.15 | 7.20 | n.t. | n.t. | 11.74 | 28.17 |
| MX1062 | I + II + III | 54.66 | 73.09 | n.t. | n.t. | 111.50 | 160.00 | n.t. | n.t. | n.t. | n.t. | n.t. | n.t. |
| MX1063 | I + II + III | 6.55 | 38.84 | n.t. | n.t. | 53.87 | 288.20 | n.t. | n.t. | n.t. | n.t. | n.t. | n.t. |
| MX1064 | I + II + III | 64.75 | 73.72 | n.t. | n.t. | 17.36 | 51.15 | n.t. | n.t. | n.t. | n.t. | n.t. | n.t. |
| MX1065 | I + II + III | n.t. | n.t. | n.t. | n.t. | n.t. | n.t. | n.t. | n.t. | n.t. | n.t. | n.t. | n.t. |
| MX1066 | I + II + III | n.t. | n.t. | n.t. | n.t. | n.t. | n.t. | n.t. | n.t. | n.t. | n.t. | n.t. | n.t. |
| MX1067 | I + II + III | 59.58 | 68.07 | n.t. | n.t. | 2.23 | 254.30 | n.t. | n.t. | n.t. | n.t. | n.t. | n.t. |
| MX1068 | I + II + III | 8.31 | 24.68 | n.t. | n.t. | 30.42 | 282.10 | n.t. | n.t. | n.t. | n.t. | n.t. | n.t. |
| MX1055 | I + II + III | n.t. | n.t. | n.t. | n.t. | n.t. | n.t. | n.t. | n.t. | n.t. | n.t. | n.t. | n.t. |
| MX1056 | I + II + III | n.t. | n.t. | n.t. | n.t. | n.t. | n.t. | n.t. | n.t. | n.t. | n.t. | n.t. | n.t. |
| MX1057 | I + II + III | n.t. | n.t. | n.t. | n.t. | n.t. | n.t. | n.t. | n.t. | n.t. | n.t. | n.t. | n.t. |
| MX1058 | I + II + III | n.t. | n.t. | n.t. | n.t. | n.t. | n.t. | n.t. | n.t. | n.t. | n.t. | n.t. | n.t. |
| A19-46 + E8 + B8 | I + II + III | n.t. | n.t. | n.t. | n.t. | n.t. | n.t. | n.t. | n.t. | n.t. | n.t. | n.t. | n.t. |
| B8 | I | 71.92 | 84.07 | n.t. | n.t. | 13.27 | 198.60 | n.t. | n.t. | n.t. | n.t. | n.t. | n.t. |
| E12 | I | 77.82 | 118.10 | n.t. | n.t. | 17.25 | 32.11 | n.t. | n.t. | n.t. | n.t. | n.t. | n.t. |
| E8 | III | 8.77 | 20.73 | n.t. | n.t. | 6.81 | 33.32 | n.t. | n.t. | n.t. | n.t. | n.t. | n.t. |
| A19-46 + E8 + B8 | II | n.t. | n.t. | n.t. | n.t. | n.t. | n.t. | n.t. | n.t. | n.t. | n.t. | n.t. | n.t. |

Unit: ng/ml

[1139] Table 17 shows the IC50 and IC80 values (in ng/mL) of the indicated molecules for neutralization of Omicron variants BA.4/5, BQ.1, BQ.1.1, BA.2.75.2, XBB, XBB1.5 and CH.1.1. The constructs tested included MX1069 (SEQ ID NOs:257, 258; 393, 394); MX1070 (SEQ ID NOs:395, 397; 396, 398); MX1071 (SEQ ID NOs:399, 401; 400, 402); MX1072 (SEQ ID NOs:403, 405; 404, 406); MX1073 (SEQ ID NOs:407, 409; 408, 410); and MX1078 (SEQ ID NOs:427, 429; 428, 430). These results show that the tested molecules potently inhibited the Omicron variants.

TABLE 17

| | | BA.4/5 | | BQ 1 | | BQ 1.1 | |
|---|---|---|---|---|---|---|---|
| ID | Class | IC50 | IC80 | IC50 | IC80 | IC50 | IC80 |
| MX1069 | I + II + III | 1.47 | 2.44 | 0.83 | 3.07 | 1.89 | 6.5 |
| MX1070 | I + II + III | 2.49 | 3.58 | 4.64 | 9.16 | 4.06 | 11.01 |
| MX1071 | I + II + III | 5.77 | 15.41 | 4.38 | 33.24 | 16.65 | 52.73 |
| MX1072 | I + II + III | 4.46 | 17.82 | 6.32 | 16.66 | 15.42 | 25.87 |
| MX1073 | I + II + III | 2.78 | 4.28 | 1.9 | 10.84 | 5.77 | 24.06 |
| MX1078 | I + II + III | 3.72 | 17.92 | 33.44 | 210.20 | 48.40 | 91.84 |
| E12 | I | 4.62 | 9.21 | 11.89 | 40.91 | 5.29 | 17.43 |
| E8 | III | 0.13 | 0.49 | 124 | 5191 | 496 | 1803 |
| A19-46 | II | >10,000 | >10,000 | n.t. | n.t. | 386 | 1111 |

| | BA.2.75.2 | | XBB | | XBB1.5 | | CH.1.1 | |
|---|---|---|---|---|---|---|---|---|
| ID | IC50 | IC80 | IC50 | IC80 | IC50 | IC80 | IC50 | IC80 |
| MX1069 | 1.81 | 3.33 | 2.48 | 5.2 | 34.78 | 65.45 | 27.11 | 104 |
| MX1070 | 2.4 | 4.16 | 2.9 | 9.71 | n.t. | n.t. | n.t. | n.t. |
| MX1071 | 3.10 | 7.72 | 3.81 | 10.08 | n.t. | n.t. | n.t. | n.t. |
| MX1072 | 16.14 | 33.83 | 8.48 | 22.06 | n.t. | n.t. | n.t. | n.t. |
| MX1073 | 1.81 | 3.35 | 9.3 | 23.99 | n.t. | n.t. | n.t. | n.t. |
| MX1078 | 5.91 | 22.25 | 45.38 | 97.31 | n.t. | n.t. | n.t. | n.t. |
| E12 | 6.99 | 40.08 | 12.65 | 31.11 | n.t. | n.t. | n.t. | n.t. |
| E8 | 1.72 | 5.9 | 61.5 | 705 | n.t. | n.t. | n.t. | n.t. |
| A19-46 | >10,000 | >10,000 | n.t. | n.t. | n.t. | n.t. | n.t. | n.t. |

Unit: ng/ml

[1140] Table 18 shows the IC50 and IC80 values (in ng/mL) of the indicated molecules for neutralization of the original Wuhan strain (WA1), D614G spike protein mutant (D614G), Delta variant, and Omicron variants B.1.1.529, BA.4.6 and BF.7. These results show that the tested molecules potently inhibited the tested viruses.

TABLE 18

| | | | | | | | | BA.1.1.529 | | | | | |
|---|---|---|---|---|---|---|---|---|---|---|---|---|---|
| | | WA1 | | D614G | | Delta | | (Omicron) | | BA.4.6 | | BF.7 | |
| ID | Class | IC50 | IC80 | IC50 | IC80 | IC50 | IC80 | IC50 | IC80 | IC50 | IC80 | IC50 | IC80 |
| MX1069 | I + II + III | 33.21 | 38.17 | 5.47 | 23.87 | 40.06 | 47.59 | 1.72 | 5.45 | n.t. | n.t. | 12.48 | 28.99 |
| MX1070 | I + II + III | n.t. | n.t. | n.t. | n.t. | n.t. | n.t. | n.t. | n.t. | n.t. | n.t. | n.t. | n.t. |
| MX1071 | I + II + III | 33.07 | 49.94 | n.t. | n.t. | 9.19 | 47.15 | n.t. | n.t. | n.t. | n.t. | n.t. | n.t. |
| MX1072 | I + II + III | 40.50 | 68.15 | n.t. | n.t. | 24.83 | 107.30 | n.t. | n.t. | n.t. | n.t. | n.t. | n.t. |
| MX1073 | I + II + III | n.t. | n.t. | n.t. | n.t. | n.t. | n.t. | n.t. | n.t. | n.t. | n.t. | n.t. | n.t. |
| MX1078 | I + II + III | 15.10 | 46.44 | n.t. | n.t. | 11.88 | 25.93 | n.t. | n.t. | n.t. | n.t. | n.t. | n.t. |
| E12 | I | 77.82 | 118.10 | n.t. | n.t. | 17.25 | 32.11 | n.t. | n.t. | n.t. | n.t. | n.t. | n.t. |
| E8 | III | 8.77 | 20.73 | n.t. | n.t. | 6.81 | 33.32 | n.t. | n.t. | n.t. | n.t. | n.t. | n.t. |
| A19-46 | II | n.t. | n.t. | n.t. | n.t. | n.t. | n.t. | n.t. | n.t. | n.t. | n.t. | n.t. | n.t. |

Unit: ng/ml

[1141] Table 19 shows the IC50 and IC80 values (in ng/mL) of the indicated molecules or combination of molecules for neutralization of Omicron variants BA.4/5, BQ.1, BQ.1.1, BA.2.75.2, XBB, XBB1.5 and CH.1.1. The constructs tested included MX1086 (SEQ ID NOs:487, 489; 488, 490); MX1087 (SEQ ID NOs:495, 497; 496, 498); MX1089 (SEQ ID NOs:499, 501; 500, 502); and MX1206 (SEQ ID NOs:503, 505; 504, 506). These results show that the tested molecules potently inhibited the Omicron variants.

TABLE 19

| | | BA.4/5 | | BQ 1 | | BQ 1.1 | | BA.2.75.2 |
|---|---|---|---|---|---|---|---|---|
| ID | Class | IC50 | IC80 | IC50 | IC80 | IC50 | IC80 | IC50 |
| MX1086 | I + II + III | 1.95 | 2.99 | 2.69 | 8.21 | 3.57 | 10.26 | 1.43 |
| MX1087 | I + II + III | 1.65 | 2.68 | 2.38 | 5.97 | 2.56 | 6.72 | 2.59 |
| MX1089 | I + II + III | 2.32 | 3.5 | 2.92 | 7.27 | 1.99 | 7.9 | 7.16 |
| MX1206 | I + II + III | 13.21 | 25.97 | 21.42 | 46.49 | 12.20 | 32.05 | 4.82 |
| B8 | I | 6.97 | 14.76 | 15.02 | 49.64 | 4.57 | 21.67 | 12.18 |
| E12 | I | 4.62 | 9.21 | 11.89 | 40.91 | 5.29 | 17.43 | 6.99 |
| E8 | III | 0.13 | 0.49 | 124 | 5191 | 496 | 1803 | 1.72 |
| A46 | II | >10,000 | >10,000 | n.t. | n.t. | 386 | 1111 | >10,000 |
| A23-58L93VGLTG | I | 5.2 | 13.5 | 23.53 | 87.67 | 30.29 | 1316 | >10,000 |
| B8 + E8 + E12 + A19-46 | I + II + III | 1.36 | 5.82 | 1.69 | 15.69 | 8.10 | 19.17 | 1.47 |

| | BA.2.75.2 | XBB | | XBB1.5 | | CH.1.1 | |
|---|---|---|---|---|---|---|---|
| ID | IC80 | IC50 | IC80 | IC50 | IC80 | IC50 | IC80 |
| MX1086 | 3.3 | 2.67 | 5.89 | n.t. | n.t. | n.t. | n.t. |
| MX1087 | 3.57 | 3.09 | 5.54 | n.t. | n.t. | n.t. | n.t. |
| MX1089 | 7.84 | 10.68 | 28.51 | 52.27 | 148 | 175 | 613 |
| MX1206 | 10.53 | 58.16 | 90.66 | 64.96 | 77.30 | 217 | 624 |
| B8 | 27.41 | 13.44 | 47.18 | n.t. | n.t. | n.t. | n.t. |
| E12 | 40.08 | 12.65 | 31.11 | n.t. | n.t. | n.t. | n.t. |
| E8 | 5.9 | 61.5 | 705 | n.t. | n.t. | n.t. | n.t. |
| A46 | >10,000 | n.t. | n.t. | n.t. | n.t. | n.t. | n.t. |
| A23-58L93VGLTG | >10,000 | >10,000 | >10,000 | n.t. | n.t. | n.t. | n.t. |
| B8 + E8 + E12 + A19-46 | 6.93 | 5.95 | 16.58 | n.t. | n.t. | n.t. | n.t. |

Unit: ng/ml

[1142] Table 20 shows the IC50 and IC80 values (in ng/mL) of the indicated molecules for neutralization of the original Wuhan strain (WA1), D614G spike protein mutant (D614G), Delta variant, and Omicron variants B.1.1.529, BA.4.6 and BF.7. These results show that the tested molecules potently inhibited the tested viruses.

TABLE 20

| | | | | | | | | BA.1.1.529 | | | | | |
|---|---|---|---|---|---|---|---|---|---|---|---|---|---|
| | | WA1 | | D614G | | Delta | | (Omicron) | | BA.4.6 | | BF.7 | |
| ID | Class | IC50 | IC80 | IC50 | IC80 | IC50 | IC80 | IC50 | IC80 | IC50 | IC80 | IC50 | IC80 |
| MX1086 | I + II + III | 5.09 | 28.06 | 18.48 | 44.17 | 39.81 | 46.45 | 2.91 | 7.73 | n.t. | n.t. | 8.49 | 22.28 |
| MX1087 | I + II + III | 20.49 | 72.67 | 23.52 | 51.78 | 17.59 | 31.98 | 1.82 | 5.24 | n.t. | n.t. | 9.06 | 31.45 |
| MX1089 | I + II + III | 36.79 | 68.74 | 13.16 | 29.38 | 78.38 | 123.40 | 2.71 | 8.34 | n.t. | n.t. | 22.61 | 64.28 |
| MX1206 | I + II + III | n.t. | n.t. | n.t. | n.t. | n.t. | n.t. | n.t. | n.t. | n.t. | n.t. | 20.05 | 36.37 |
| B8 | I | 71.92 | 84.07 | n.t. | n.t. | 13.27 | 198.60 | n.t. | n.t. | n.t. | n.t. | n.t. | n.t. |
| E12 | I | 77.82 | 118.10 | n.t. | n.t. | 17.25 | 32.11 | n.t. | n.t. | n.t. | n.t. | n.t. | n.t. |
| E8 | III | 8.77 | 20.73 | n.t. | n.t. | 6.81 | 33.32 | n.t. | n.t. | n.t. | n.t. | n.t. | n.t. |
| A46 | II | n.t. | n.t. | n.t. | n.t. | n.t. | n.t. | n.t. | n.t. | n.t. | n.t. | n.t. | n.t. |
| A23-58L93VGLTG | I | n.t. | n.t. | n.t. | n.t. | n.t. | n.t. | n.t. | n.t. | n.t. | n.t. | n.t. | n.t. |
| B8 + E8 + E12 + A19-46 | I + II + III | n.t. | n.t. | n.t. | n.t. | n.t. | n.t. | n.t. | n.t. | n.t. | n.t. | n.t. | n.t. |

Unit: ng/ml

[1143] Table 21 shows the IC50 and IC80 values (in ng/mL) of the indicated molecules or bebtelovimab (LY1404) for neutralization of Omicron variants BA.4/5, BQ.1, BQ.1.1, BA.2.75.2, XBB, XBB1.5 and CH.1.1. The constructs tested included MX1018 (SEQ ID NOs:291, 291; 292, 292); MX1029 (SEQ ID NOs:295, 295; 296, 296); MX1020 (SEQ ID NOs:297, 297; 298, 298); MX1019 (SEQ ID NOs:329, 329; 330, 330); MX1025 (SEQ ID NOs:331, 331; 332, 332); and MX1026 (SEQ ID NOs:333, 333; 334, 334). These results show that the tested molecules potently inhibited the Omicron variants, and to a much greater extent than LY1404.

TABLE 21

| | | BA.4/5 | | BQ 1 | | BQ 1.1 | |
|---|---|---|---|---|---|---|---|
| ID | Class | IC50 | IC80 | IC50 | IC80 | IC50 | IC80 |
| MX1018 | I | 10.68 | 58.12 | 51.26 | 98.26 | 4.33 | 11.9 |
| MX1029 | I | 8.62 | 34.08 | 54.08 | 69.43 | 3.79 | 6.78 |
| MX1020 | III | 3.6 | 7.94 | 7.78 | 17.41 | 2.19 | 3.61 |
| MX1019 | I | n.t. | n.t. | 24.08 | 61.09 | 14.24 | 24.5 |
| MX1025 | I | n.t. | n.t. | 29.76 | 43.05 | 30.28 | 34.95 |
| MX1026 | III | n.t. | n.t. | 425.2 | 2769 | 963.2 | 3936 |
| B8 | I | 6.97 | 14.76 | 15.02 | 49.64 | 4.57 | 21.67 |
| E12 | I | 4.62 | 9.21 | 11.89 | 40.91 | 5.29 | 17.43 |
| E8 | III | 0.13 | 0.49 | 124 | 5191 | 496 | 1803 |
| LY1404 | III | | | n.t. | n.t. | >10,000 | >10,000 |

| | BA.2.75.2 | | XBB | | XBB1.5 | | CH.1.1 | |
|---|---|---|---|---|---|---|---|---|
| ID | IC50 | IC80 | IC50 | IC80 | IC50 | IC80 | IC50 | IC80 |
| MX1018 | 4.09 | 10.97 | 6.6 | 20.1 | n.t. | n.t. | n.t. | n.t. |
| MX1029 | 4.17 | 7.07 | 2 | 8.66 | n.t. | n.t. | n.t. | n.t. |
| MX1020 | 1.56 | 4.22 | 1.22 | 5.72 | n.t. | n.t. | n.t. | n.t. |
| MX1019 | n.t. | n.t. | 13.06 | 20.55 | n.t. | n.t. | n.t. | n.t. |
| MX1025 | n.t. | n.t. | 32.79 | 32.23 | n.t. | n.t. | n.t. | n.t. |
| MX1026 | n.t. | n.t. | 1247 | 4536 | n.t. | n.t. | n.t. | n.t. |
| B8 | 12.18 | 27.41 | 13.44 | 47.18 | n.t. | n.t. | n.t. | n.t. |
| E12 | 6.99 | 40.08 | 12.65 | 31.11 | n.t. | n.t. | n.t. | n.t. |
| E8 | 1.72 | 5.9 | 61.5 | 705 | n.t. | n.t. | n.t. | n.t. |
| LY1404 | 5.67 | 20.72 | >10,000 | >10,000 | n.t. | n.t. | n.t. | n.t. |

Unit: ng/ml

[1144] Table 22 shows the IC50 and IC80 values (in ng/mL) of the indicated molecules for neutralization of the original Wuhan strain (WA1), D614G spike protein mutant (D614G), Delta variant, and Omicron variants B.1.1.529, BA.4.6 and BF.7. These results show that the tested molecules potently inhibited the tested viruses.

TABLE 22

| | | | | | | | | BA.1.1.529 | | | | | |
|---|---|---|---|---|---|---|---|---|---|---|---|---|---|
| | | WA1 | | D614G | | Delta | | (Omicron) | | BA.4.6 | | BF.7 | |
| ID | Class | IC50 | IC80 | IC50 | IC80 | IC50 | IC80 | IC50 | IC80 | IC50 | IC80 | IC50 | IC80 |
| MX1018 | I | n.t. | n.t. | 10.68 | 58.12 | 51.26 | 98.26 | 4.33 | 11.9 | 4.09 | 10.97 | 6.6 | 20.1 |
| MX1029 | I | n.t. | n.t. | 8.62 | 34.08 | 54.08 | 69.43 | 3.79 | 6.78 | 4.17 | 7.07 | 2 | 8.66 |
| MX1020 | III | n.t. | n.t. | 3.6 | 7.94 | 7.78 | 17.41 | 2.19 | 3.61 | 1.56 | 4.22 | 1.22 | 5.72 |
| MX1019 | I | n.t. | n.t. | n.t. | n.t. | n.t. | n.t. | n.t. | n.t. | n.t. | n.t. | n.t. | n.t. |
| MX1025 | I | n.t. | n.t. | n.t. | n.t. | n.t. | n.t. | n.t. | n.t. | n.t. | n.t. | n.t. | n.t. |
| MX1026 | III | n.t. | n.t. | n.t. | n.t. | n.t. | n.t. | n.t. | n.t. | n.t. | n.t. | n.t. | n.t. |
| B8 | I | n.t. | n.t. | n.t. | n.t. | n.t. | n.t. | n.t. | n.t. | n.t. | n.t. | n.t. | n.t. |
| E12 | I | n.t. | n.t. | n.t. | n.t. | n.t. | n.t. | n.t. | n.t. | n.t. | n.t. | n.t. | n.t. |
| E8 | III | n.t. | n.t. | n.t. | n.t. | n.t. | n.t. | n.t. | n.t. | n.t. | n.t. | n.t. | n.t. |
| LY1404 | III | n.t. | n.t. | n.t. | n.t. | n.t. | n.t. | n.t. | n.t. | n.t. | n.t. | n.t. | n.t. |

Unit: ng/ml

[1145] Table 23 shows the IC50 and IC80 values (in ng/mL) of the indicated molecules, combination of molecules, or bebtelovimab (LY1404) for neutralization of Omicron variants BA.4/5, BQ.1, BQ.1.1, BA.2.75.2, XBB, XBB1.5 and CH.1. The constructs tested included MX1021 (SEQ ID NOs:299, 299; 300, 300); MX1022 (SEQ ID NOs:301, 301; 302, 302); MX1023 (SEQ ID NOs:303, 303; 304, 304); MX1024 (SEQ ID NOs:305, 305; 306, 306); MX1027 (SEQ ID NOs:307, 309; 308, 310); and MX1028 (SEQ ID NOs:311, 313; 312, 314). These results show that the tested molecules potently inhibited the Omicron variants, and to a much greater extent than LY1404.

TABLE 23

| | | BA.4/5 | | BQ 1 | | BQ 1.1 | |
|---|---|---|---|---|---|---|---|
| ID | Class | IC50 | IC80 | IC50 | IC80 | IC50 | IC80 |
| MX1021 | I + II | 13.79 | 26 | 11.34 | 51.89 | 2.77 | 28.49 |
| MX1022 | I + III | 1.98 | 3.33 | 6.58 | 19.2 | 1.13 | 6.72 |
| MX1023 | I + II | 29.66 | 30.72 | 29.72 | 85.18 | 28.38 | 95.98 |
| MX1024 | I + III | n.t. | n.t. | 17.56 | 37.09 | 12.07 | 16.93 |
| MX1027 | I + II | n.t. | n.t. | 21.6 | 64.86 | 13.51 | 23.24 |
| MX1028 | I + III | 1.81 | 3.73 | 10.48 | 25.46 | 4.2 | 14.38 |
| B8 | I | 6.97 | 14.76 | 15.02 | 49.64 | 4.57 | 21.67 |
| E8 | III | 0.13 | 0.49 | 124 | 5191 | 496 | 1803 |
| A19-46 | II | >10,000 | >10,000 | n.t. | n.t. | 386 | 1111 |
| A46 + B8 | II + III | n.t. | n.t. | 18.57 | 49.26 | 14.46 | 27.32 |
| E8 + B8 | I + III | n.t. | n.t. | 11.04 | 30.54 | 9.55 | 13.23 |
| LY1404 | III | | | n.t. | n.t. | >10,000 | >10,000 |

| | BA.2.75.2 | | XBB | | XBB1.5 | | CH.1.1 | |
|---|---|---|---|---|---|---|---|---|
| ID | IC50 | IC80 | IC50 | IC80 | IC50 | IC80 | IC50 | IC80 |
| MX1021 | 3.73 | 13.22 | 14.66 | 61.12 | n.t. | n.t. | n.t. | n.t. |
| MX1022 | 0.89 | 2.8 | 5.85 | 12.44 | n.t. | n.t. | n.t. | n.t. |
| MX1023 | 11.07 | 29.49 | 9.79 | 53.23 | n.t. | n.t. | n.t. | n.t. |
| MX1024 | n.t. | n.t. | 10.52 | 12.92 | n.t. | n.t. | n.t. | n.t. |
| MX1027 | n.t. | n.t. | 12.87 | 20.69 | n.t. | n.t. | n.t. | n.t. |
| MX1028 | 2.43 | 7.4 | 6.77 | 16.14 | n.t. | n.t. | n.t. | n.t. |
| B8 | 12.18 | 27.41 | 13.44 | 47.18 | n.t. | n.t. | n.t. | n.t. |
| E8 | 1.72 | 5.9 | 61.5 | 705 | n.t. | n.t. | n.t. | n.t. |
| A19-46 | >10,000 | >10,000 | n.t. | n.t. | n.t. | n.t. | n.t. | n.t. |
| A46 + B8 | n.t. | n.t. | 18.55 | 48.06 | n.t. | n.t. | n.t. | n.t. |
| E8 + B8 | n.t. | n.t. | 9.962 | 18.05 | n.t. | n.t. | n.t. | n.t. |
| LY1404 | 5.67 | 20.72 | >10,000 | >10,000 | n.t. | n.t. | n.t. | n.t. |

Unit: ng/ml

[1146] Table 24 shows the IC50 and IC80 values (in ng/mL) of the indicated molecules for neutralization of the original Wuhan strain (WA1), D614G spike protein mutant (D614G), Delta variant, and Omicron variants B.1.1.529, BA.4.6 and BF.7. These results show that the tested molecules potently inhibited the tested viruses.

TABLE 24

| | | | | | | | | BA.1.1.529 | | | | | |
|---|---|---|---|---|---|---|---|---|---|---|---|---|---|
| | | WA1 | | D614G | | Delta | | (Omicron) | | BA.4.6 | | BF.7 | |
| ID | Class | IC50 | IC80 | IC50 | IC80 | IC50 | IC80 | IC50 | IC80 | IC50 | IC80 | IC50 | IC80 |
| MX1021 | I + II | n.t. | n.t. | | | 64.83 | 218.6 | 2.91 | 13.08 | 12.95 | 41.4 | 11.33 | 31.67 |
| MX1022 | I + III | n.t. | n.t. | 5.15 | 13.33 | 31.53 | 25.37 | 4.22 | 4.74 | 4.9 | 8.82 | 2.38 | 8.29 |
| MX1023 | I + II | 15.31 | 82.37 | 22.87 | 40.6 | 88.89 | 205.4 | 3.74 | 8.67 | 23.44 | 77.55 | 18.67 | 54.51 |
| MX1024 | I + III | 1.76 | 15.65 | 1.76 | 8.16 | 32.93 | 37.13 | 1.63 | 5.44 | n.t. | n.t. | 3.12 | 12.50 |
| MX1027 | I + II | n.t. | n.t. | n.t. | n.t. | n.t. | n.t. | n.t. | n.t. | n.t. | n.t. | n.t. | n.t. |
| MX1028 | I + III | n.t. | n.t. | n.t. | n.t. | n.t. | n.t. | n.t. | n.t. | n.t. | n.t. | n.t. | n.t. |
| B8 | I | n.t. | n.t. | n.t. | n.t. | n.t. | n.t. | n.t. | n.t. | n.t. | n.t. | n.t. | n.t. |
| E8 | III | n.t. | n.t. | n.t. | n.t. | n.t. | n.t. | n.t. | n.t. | n.t. | n.t. | n.t. | n.t. |
| A19-46 | II | n.t. | n.t. | n.t. | n.t. | n.t. | n.t. | n.t. | n.t. | n.t. | n.t. | n.t. | n.t. |
| A46 + B8 | II + III | n.t. | n.t. | n.t. | n.t. | n.t. | n.t. | n.t. | n.t. | n.t. | n.t. | n.t. | n.t. |
| E8 + B8 | I + III | n.t. | n.t. | n.t. | n.t. | n.t. | n.t. | n.t. | n.t. | n.t. | n.t. | n.t. | n.t. |
| LY1404 | III | n.t. | n.t. | n.t. | n.t. | n.t. | n.t. | n.t. | n.t. | n.t. | n.t. | n.t. | n.t. |

Unit: ng/ml

[1147] Table 25 shows the IC50 and IC80 values (in ng/mL) of the indicated molecules or combination of molecules for neutralization of Omicron variants BA.4/5, BQ.1, BQ.1.1, BA.2.75.2, XBB, XBB1.5 and CH.1.1. The constructs tested included MX1041 (SEQ ID NOs:315, 315; 316, 316); MX1042 (SEQ ID NOs:256, 256; 507, 507); MX1043 (SEQ ID NOs:317, 317; 318, 318); MX1045 (SEQ ID NOs:321, 323; 322, 324); and MX1046 (SEQ ID NOs:325, 327; 326, 328). These results show that the tested molecules potently inhibited the Omicron variants.

TABLE 25

| | | BA.4/5 | | BQ 1 | | BQ 1.1 | |
|---|---|---|---|---|---|---|---|
| ID | Class | IC50 | IC80 | IC50 | IC80 | IC50 | IC80 |
| MX1041 | I + II | 12.04 | 26.23 | 42.86 | 188 | 49.25 | 110 |
| MX1042 | I + III | 1.37 | 2.75 | 11.89 | 27.37 | 0.29 | 3.5 |
| MX1043 | I + II | 3.74 | 10.69 | 2.64 | 15.09 | 2.35 | 12.29 |
| MX1045 | I + II | 2.68 | 6.06 | 6.02 | 22.31 | 1.5 | 8.57 |
| MX1046 | I + III | 0.9 | 1.56 | 1.66 | 4.08 | 1.23 | 3.97 |
| E12 | I | 4.62 | 9.21 | 11.89 | 40.91 | 5.29 | 17.43 |
| E8 | III | 0.13 | 0.49 | 124 | 5191 | 496 | 1803 |
| A46 | II | >10,000 | >10,000 | n.t. | n.t. | 386 | 1111 |
| A19-46 + E12 | I + II | 1.96 | 4.26 | 2.27 | 6.63 | 1.65 | 5.09 |
| E8 + E12 | I + III | 0.4 | 0.78 | 0.89 | 3.27 | 1.77 | 4.52 |

| | BA.2.75.2 | | XBB | | XBB1.5 | | CH.1.1 | |
|---|---|---|---|---|---|---|---|---|
| ID | IC50 | IC80 | IC50 | IC80 | IC50 | IC80 | IC50 | IC80 |
| MX1041 | 12.88 | 36.25 | 69.09 | 398 | n.t. | n.t. | n.t. | n.t. |
| MX1042 | 0.01 | 0.05 | 7.55 | 16.54 | 41.79 | 81.52 | 46.17 | 158 |
| MX1043 | 2.06 | 4.01 | 2.17 | 7.05 | 68.73 | 155 | 45.05 | 232 |
| MX1045 | 2.91 | 5.43 | 6.09 | 18.04 | n.t. | n.t. | n.t. | n.t. |
| MX1046 | 0.36 | 1.29 | 1.26 | 2.88 | n.t. | n.t. | n.t. | n.t. |
| E12 | 6.99 | 40.08 | 12.65 | 31.11 | n.t. | n.t. | n.t. | n.t. |
| E8 | 1.72 | 5.9 | 61.5 | 705 | n.t. | n.t. | n.t. | n.t. |
| A46 | >10,000 | >10,000 | n.t. | n.t. | n.t. | n.t. | n.t. | n.t. |
| A19-46 + E12 | 2.36 | 4.68 | 2.76 | 9.01 | n.t. | n.t. | n.t. | n.t. |
| E8 + E12 | 0.01 | 0.05 | 2.96 | 7.82 | n.t. | n.t. | n.t. | n.t. |

Unit: ng/ml

[1148] Table 26 shows the IC50 and IC80 values (in ng/mL) of the indicated molecules for neutralization of the D614G spike protein mutant (D614G), Delta variant, and Omicron variants B.1.1.529, BA.4.6 and BF.7. These results show that the tested molecules potently inhibited the tested viruses.

TABLE 26

| | | | | | | | | BA.1.1.529 | | | | | |
|---|---|---|---|---|---|---|---|---|---|---|---|---|---|
| | | WA1 | | D614G | | Delta | | (Omicron) | | BA.4.6 | | BF.7 | |
| ID | Class | IC50 | IC80 | IC50 | IC80 | IC50 | IC80 | IC50 | IC80 | IC50 | IC80 | IC50 | IC80 |
| MX1041 | I + II | n.t. | n.t. | 7.69 | 45.67 | 29.05 | 48.51 | 4.14 | 8.81 | 25.72 | 67.06 | 8.35 | 30.38 |
| MX1042 | I + III | n.t. | n.t. | 6.03 | 12.17 | 41.69 | 61.43 | 2.56 | 4.34 | 2.1 | 4.51 | 2.73 | 6.74 |
| MX1043 | I + II | n.t. | n.t. | n.t. | n.t. | n.t. | n.t. | n.t. | n.t. | n.t. | n.t. | n.t. | n.t. |
| MX1045 | I + II | n.t. | n.t. | n.t. | n.t. | n.t. | n.t. | n.t. | n.t. | n.t. | n.t. | n.t. | n.t. |
| MX1046 | I + III | n.t. | n.t. | n.t. | n.t. | n.t. | n.t. | n.t. | n.t. | n.t. | n.t. | n.t. | n.t. |
| E12 | I | n.t. | n.t. | n.t. | n.t. | n.t. | n.t. | n.t. | n.t. | n.t. | n.t. | n.t. | n.t. |
| E8 | III | n.t. | n.t. | n.t. | n.t. | n.t. | n.t. | n.t. | n.t. | n.t. | n.t. | n.t. | n.t. |
| A46 | II | n.t. | n.t. | n.t. | n.t. | n.t. | n.t. | n.t. | n.t. | n.t. | n.t. | n.t. | n.t. |
| A19-46 + E12 | I + II | n.t. | n.t. | n.t. | n.t. | n.t. | n.t. | n.t. | n.t. | n.t. | n.t. | n.t. | n.t. |
| E8 + E12 | I + III | n.t. | n.t. | n.t. | n.t. | n.t. | n.t. | n.t. | n.t. | n.t. | n.t. | n.t. | n.t. |

Unit: ng/ml

[1149] Table 27 shows the IC50 and IC80 values (in ng/mL) of the indicated molecules for neutralization of Omicron variants BA.4/5, BQ.1, BQ.1.1, BA.2.75.2, XBB, XBB1.5 and CH.1.1. The constructs tested included MX1047 (SEQ ID NOs:335, 337; 336, 338); and MX1049 (SEQ ID NOs:339, 339; 340, 340). These results show that the tested molecules potently inhibited the Omicron variants.

TABLE 27

| | | BA.4/5 | | BQ 1 | | BQ 1.1 | | BA.2.75.2 |
|---|---|---|---|---|---|---|---|---|
| ID | Class | IC50 | IC80 | IC50 | IC80 | IC50 | IC80 | IC50 |
| MX1047 | I + III | 3.46 | 8.46 | 19.72 | 190 | 96.68 | 700 | 4.36 |
| MX1049 | I + III | 3.47 | 10.64 | 22.65 | 103 | 64.5 | 2177 | 6.36 |
| E8 | III | 0.13 | 0.49 | 124 | 5191 | 496 | 1803 | 1.72 |
| A23-58L93VGLTG | I | 5.2 | 13.5 | 23.53 | 87.67 | 30.29 | 1316 | >10,000 |

| | BA.2.75.2 | XBB | | XBB1.5 | | CH.1.1 | |
|---|---|---|---|---|---|---|---|
| ID | IC80 | IC50 | IC80 | IC50 | IC80 | IC50 | IC80 |
| MX1047 | 25.83 | 208 | 3291 | n.t. | n.t. | n.t. | n.t. |
| MX1049 | 17.13 | 156 | 4531 | n.t. | n.t. | n.t. | n.t. |
| E8 | 5.9 | 61.5 | 705 | n.t. | n.t. | n.t. | n.t. |
| A23-58L93VGLTG | >10,000 | >10,000 | >10,000 | n.t. | n.t. | n.t. | n.t. |

Unit: ng/ml

[1150] Table 28 shows the IC50 and IC80 values (in ng/mL) of the indicated molecules for neutralization of the D614G spike protein mutant (D614G), Delta variant, and Omicron variants B.1.1.529, BA.4.6 and BF.7. These results show that the tested molecules potently inhibited the tested viruses.

TABLE 28

| | | | | | | | | BA.1.1.529 | | | | | |
|---|---|---|---|---|---|---|---|---|---|---|---|---|---|
| | | WA1 | | D614G | | Delta | | (Omicron) | | BA.4.6 | | BF.7 | |
| ID | Class | IC50 | IC80 | IC50 | IC80 | IC50 | IC80 | IC50 | IC80 | IC50 | IC80 | IC50 | IC80 |
| MX1047 | I + III | n.t. | n.t. | 3.48 | 5.52 | 27.73 | 46.94 | 4.04 | 4.6 | 7.11 | 17.17 | 4.37 | 19.32 |
| MX1049 | I + III | n.t. | n.t. | 5.61 | 12.79 | 18.79 | 22.03 | 3.27 | 7.16 | 5.19 | 20.45 | 4.68 | 19.88 |
| E8 | III | n.t. | n.t. | n.t. | n.t. | n.t. | n.t. | n.t. | n.t. | n.t. | n.t. | n.t. | n.t. |
| A23-58L93VGLTG | I | n.t. | n.t. | n.t. | n.t. | n.t. | n.t. | n.t. | n.t. | n.t. | n.t. | n.t. | n.t. |

Unit: ng/ml

### Example 8

### Pseudovirus Neutralization Assay and Other Properties

[1151] The pseudotyped neutralization potency (IC50 and IC80) of additional antibodies was determined using the methods described in Example 2.

[1152] FIG. 22 shows the IC50 and IC80 values (in nM) of the indicated molecules, or combination of molecules, for neutralization of Omicron sublineages BA.4/5, BQ.1, BQ.1.1, BA.2.75.2, XBB, XBB1.5, BF.7 and CH.1.1. The antibody constructs tested included MX1042 (SEQ ID NOs:256, 256; 507, 507); MX1043 (SEQ ID NOs:317, 317; 318, 318); MX1069 (SEQ ID NOs:257, 258; 393, 394); MX1055 (SEQ ID NOs:377, 379; 378, 380); MX1089 (SEQ ID NOs:499, 501; 500, 502); and MX1206 (SEQ ID NOs:503, 505; 504, 506). These results show that the tested molecules potently inhibited the Omicron variants.

[1153] In addition, blood levels and pI were measured for MX1042, MX1043, MX1069, MX1089, MX1206 and MX1091. Table 29 shows pI values measured.

TABLE 29

| | MX1042 | MX1043 | MX1069 | MX1089 | MX1206 | MX1091 |
|---|---|---|---|---|---|---|
| pI | 6.92 | 6.99 | 6.73 | 8.36 | 7.8 | 7.92 |

[1154] FIG. 24 shows the blood levels of these antibodies in Syrian hamsters up to 21 days after infusion.

### Example 9

### Tetravalent, Trispecific and Tetraspecific Antibodies

### Protect Syrian Hamsters from SARS-CoV-2 Variants

[1155] FIG. 25 shows a diagram of a passive transfer experiment that was performed in Syrian hamsters, the methods of which are explained further in Example 4. Animals were treated with 10 mg/kg MX1069 or 10 mg/kg MX1089, or with a combination of 10 mg/kg E12 and E8 or PBS as controls. Body weight was measured daily after challenge with Omicro variant XBB. In addition, viral load of the lungs and viral load of the nares were measured in TCID50/g as explained in Example 4.

[1156] FIG. 26A shows the percent body weight change of XBB-infected animals treated with MX1069 and MX1089. These results show that both MX1069 and MX1089 protected animals from weight loss caused by XBB infection.

[1157] FIG. 26B shows the lung viral load (left panel) and nares viral load (right panel) of XXB-infected animals treated with MX1069 and MX1089. These results show that MX1069 reduced lung viral titers.

### Example 10

### Tetravalent, Bispecific Antibodies Protect Syrian Hamsters from SARS-CoV-2 Variants

[1158] FIG. 27 shows a diagram of a passive transfer experiment that was performed in Syrian hamsters, the methods of which are explained further in Example 4. Animals were treated with 10 mg/kg MX1042, 10 mg/kg MX1043, a combination of 10 mg/kg MX1042 and MX1043, or PBS as a control. Body weight was measured daily after challenge with Omicro variant XBB. In addition, viral load of the lungs and viral load of the nares were measured in TCID50/g as explained in Example 4.

[1159] FIG. 28A shows the percent body weight change of XBB-infected animals treated with MX1042, MX1043 and a combination of MX1042 and MX1043. These results show that both MX1042 and MX1043 protected animals from weight loss caused by XBB infection.

[1160] FIG. 28B shows the lung viral load (left panel) and nares viral load (right panel) of XXB-infected animals treated with MX1042, MX1043 and a combination of MX1042 and MX1043. These results show that MX1043 and the combination of MX1043 and MX1042 reduced lung viral titers.

### Example 11

### Pseudovirus Neutralization Assay

[1161] A tetravalent, trispecific antibody, 46.1-182.1v/61.1-182.1v, was designed that contained single Fv46 and Fv61 domains and two stabilized 182.1 Fv (Fv182.1v) domains, using the methods of Example 1. The pseudotyped neutralization potency (IC50 and IC80) of these antibodies was then determined using the methods described in Example 2.

[1162] FIG. 29A shows the SEC elution profile of 46.1-182.1v/61.1-182.1v for preparative and analytic SEC. Specifically, traces from preparative SEC (pSEC, HiLoad 26/600 Superdex 200 pg, left) and analytic SEC (aSEC, Superdex 200 Increase 5/150GL, right) are shown after the combination of fractions collected from the boxed region of the preparative SEC gel. The box indicates fractions pooled from pSEC that were subsequently analyzed on the aSEC column. The same fractions were used for the hamster experiment.

[1163] FIG. 29B shows the IC50 and IC80 values (in pM) of the indicated molecules, for neutralization of Omicron sublineages B.1.1.7, BA.1, BA.2 and BA.4/5. These results show that 46.1-182.1v/61.1-182.1v potently inhibited the Omicron variants, and to a greater extent than Ly-CoV555 or LY-CoV1404.

### Example 12

### Lung Histopathology of BA.5-Infected Hamsters Treated with 46.1-182.1v/61.1-182.1v

[1164] To assess the clinical impact of 46.1-182.1v/61.1-182.1v on lung infection and pathology, a histopathologic examination was performed on lung tissue from BA.5-infected Syrian hamsters treated with PBS or antibody.

[1165] On days 2, 4, 6 and 10, four animals were euthanized and a histopathological examination was performed on the lungs. At necropsy, the left lung was collected and placed in 10% neutral buffered formalin for histopathologic analysis. Tissue sections were trimmed and processed to hematoxylin and eosin (H&E) stained slides and examined by a board-certified pathologist at Experimental Pathology Laboratories, Inc. (EPL®) in Sterling, Virginia.

[1166] Fixed lung was processed for immunohistochemical (IHC) detection of SARS-CoV-2 nucleocapsid protein, using a SARS-CoV-2 (COVID-19) nucleocapsid antibody on formalin-fixed paraffin-embedded tissue. Anti-SARS-CoV-2, 0.02 μg/mL, primary antibody (ProSci 9099; SARS-CoV-2 (COVID-19) Nucleocapsid Antibody) was applied to tissues overnight at 4° C. (±2° C.) followed by Polymer Anti-Rabbit Immunoglobulin G (IgG) Reagent (made in goat, ready-to-use [RTU]) for 30 minutes, 3,3′-Diaminobenzidine tetrahydrochloride (DAB) solution (3 minutes), and counterstained with hematoxylin. Background staining was equally observed in both control and treated animals and did not impede interpretation.

[1167] Representative images from histopathologic tissue sections stained with hematoxylin and eosin (H&E) (top rows) or immunostained with anti-SARS-CoV-2 nucleocapsid antibody (bottom rows) are shown herein.

[1168] Results from Day 2 and Day 4 are shown in FIG. 30A.

[1169] Day 2. In PBS control and antibody-treated animals, SARS-CoV-2 (BA.5)-related microscopic findings were minimal to mild. Mild to moderate SARS-CoV-2 nucleocapsid immunoreactivity (intense dark brown staining) was observed in PBS controls, while minimal to mild immunoreactivity was observed in antibody-treated animals. Immunoreactivity was localized in Type II pneumocytes lining the alveolar septa (arrows) and bronchiolar epithelium (arrowheads).

[1170] Day 4. SARS-CoV-2 (BA.5)-related microscopic findings were observed in the lung of PBS control and antibody-treated animals. In H&E sections, affected areas are dark and consolidated (arrows). Severity and/or incidence of SARS-CoV-2 (BA.5)-related microscopic findings were decreased in antibody-treated animals compared to PBS controls. Mild to moderate SARS-CoV-2 nucleocapsid immunoreactivity (brown staining) was mainly observed in Type II pneumocytes lining alveolar septa in control animals. Immunoreactivity was observed in antibody-treated animals; however, the minimal to mild nature was not visible at low magnification. Faint brown discoloration in antibody-treated animals was considered background staining of inflammatory cells and not indicative of nucleocapsid reactivity.

[1171] Results from Day 6 and Day 10 are shown in FIG. 30B.

[1172] Day 6. There were SARS-CoV-2 (BA.5)-related microscopic findings observed in the lung of PBS control and antibody-treated animals. In H&E sections, affected areas were dark and consolidated (arrows). Severity and/or incidence of SARS-CoV-2 (BA.5)-related microscopic findings were decreased in antibody-treated animals compared to PBS controls. Minimal to mild SARS-CoV-2 nucleocapsid immunoreactivity was observed in Type II pneumocytes lining alveolar septa in PBS control animals; however, the minimal to mild nature was not visible at low magnification.

[1173] Day 10. There were no SARS-CoV-2 (BA.5)-related microscopic findings in the lung of animals treated with antibody. SARS-CoV-2 (BA.5)-related microscopic findings were observed in PBS control animals; affected areas were dark and consolidated (arrows). SARS-CoV-2 nucleocapsid immunoreactivity was not observed in any group.

[1174] Tables 30-33 show the lung histopathology scoring of BA.5-infected Syrian hamsters treated with PBS or 46.1-182.1v/61.1-182.1v. The severity of the microscopic finding and the number of animals noted to have the finding at that severity level are noted. Grading scales are as follows:

[1175] Minimal. This corresponds to a histopathologic change ranging from inconspicuous to barely noticeable but so minor, small, or infrequent as to warrant no more than the least assignable grade. For multifocal or diffusely-distributed lesions, this grade was used for processes where less than approximately 10% of the tissue in an average high-power field was involved. For focal or diffuse hyperplastic/hypoplastic/atrophic lesions, this grade was used when the affected structure or tissue had undergone a less than approximately 10% increase or decrease in volume.

[1176] Mild. This corresponds to a histopathologic change that is a noticeable but not a prominent feature of the tissue. For multifocal or diffusely-distributed lesions, this grade was used for processes where between approximately 10% and 25% of the tissue in an average high-power field was involved. For focal or diffuse hyperplastic/hypoplastic/atrophic lesions, this grade was used when the affected structure or tissue had undergone between an approximately 10% to 25% increase or decrease in volume.

[1177] Moderate. This corresponds to a histopathologic change that is a prominent but not a dominant feature of the tissue. For multifocal or diffusely-distributed lesions, this grade was used for processes where between approximately 25% and 50% of the tissue in an average high-power field was involved. For focal or diffuse hyperplastic/hypoplastic/atrophic lesions, this grade was used when the affected structure or tissue had undergone between an approximately 25% to 50% increase or decrease in volume.

[1178] Marked. This corresponds to a histopathologic change that is a dominant but not an overwhelming feature of the tissue. For multifocal or diffusely-distributed lesions, this grade was used for processes where between approximately 50% and 95% of the tissue in an average high-power field was involved. For focal or diffuse hyperplastic/hypoplastic/atrophic lesions, this grade was used when the affected structure or tissue had undergone between an approximately 50% to 95% increase or decrease in volume.

[1179] Severe. This corresponds to a histopathologic change that is an overwhelming feature of the tissue. For multifocal or diffusely-distributed lesions, this grade was used for processes where greater than approximately 95% of the tissue in an average high-power field was involved. For focal or diffuse hyperplastic/hypoplastic/atrophic lesions, this grade was used when the affected structure or tissue had undergone a greater than approximately 95% increase of decrease in volume.

[1180] Table 30 shows apoptosis, immunoreactivity and inflammation scoring from study day 2. Table 31 shows apoptosis, immunoreactivity and inflammation scoring from study day 4. Table 32 shows apoptosis, immunoreactivity and inflammation scoring from study day 6. Table 33 shows apoptosis, immunoreactivity and inflammation scoring from study day 10.

TABLE 30
Study Day 2

| | PBS | Rx Group |
|---|---|---|
| Groups | (n = 4) | (n = 4) |
| Apoptosis | | |
| Minimal | 3 | — |
| SARS-CoV-2 Immunoreactivity | | |
| Minimal | — | 1 |
| Mild | 1 | 3 |
| Moderate | 3 | — |
| Inflammation, mixed or mononuclear cell | | |
| alv/br/BA/Interstitial | | |
| Minimal | 3 | 3 |
| Mild | 1 | — |
| Inflammation, mononuclear cell, | | |
| vascular/perivascular | | |
| Minimal | — | 1 |
| Mild | — | — |

alv = alveolar,
br = bronchial,
BA = bronchoalveolar

TABLE 31
Study Day 4

| | PBS | Rx Group |
|---|---|---|
| Groups | (n = 4) | (n = 4) |
| Alveolar Hemorrhage | | |
| Minimal | 1 | — |
| Hyperplasia | | |
| Minimal | 1 | — |
| SARS-CoV-2 Immunoreactivity | | |
| Minimal | — | 2 |
| Mild | 2 | 1 |
| Moderate | 2 | — |
| Inflammation, mixed or mononuclear cell | | |
| alv/br/BA/Interstitial | | |
| Minimal | — | 1 |
| Mild | — | 1 |
| Moderate | 4 | — |
| Inflammation, mononuclear cell, | | |
| vascular/perivascular | | |
| Minimal | — | 2 |
| Mild | 4 | — |

alv = alveolar,
br = bronchial,
BA = bronchoalveolar

TABLE 32
Study Day 6

| | PBS | Rx Group |
|---|---|---|
| Groups | (n = 4) | (n = 4) |
| Edema | | |
| Minimal | 3 | 2 |
| Mild | 1 | — |
| Alveolar Hemorrhage | | |
| Minimal | 4 | — |
| Hyperplasia | | |
| Minimal | — | — |
| Mild | 4 | 2 |
| SARS-CoV-2 Immunoreactivity | | |
| Minimal | 1 | 1 |
| Mild | 1 | — |
| Inflammation, mixed or mononuclear cell | | |
| alv/br/BA/Interstitial | | |
| Minimal | — | — |
| Mild | — | 1 |
| Moderate | 3 | 1 |
| Marked | 1 | — |
| Inflammation, mononuclear cell, | | |
| vascular/perivascular | | |
| Minimal | — | — |
| Mild | 4 | 2 |
| Syncytial Cell | | |
| Minimal | 4 | 1 |

alv = alveolar,
br = bronchial,
BA = bronchoalveolar

TABLE 33

| | PBS | Rx Group |
|---|---|---|
| Groups | (n = 4) | (n = 4) |
| Edema | | |
| Minimal | 1 | — |
| Hyperplasia | 4 | — |
| Minimal | — | — |
| Mild | 1 | — |
| Moderate | 3 | — |
| SARS-CoV-2 Immunoreactivity | | |
| Inflammation, mixed or mononuclear cell | | |
| alv/br/BA/Interstitial | | |
| Minimal | 3 | — |
| Mild | — | — |
| Moderate | 1 | — |
| Inflammation, mononuclear cell, | | |
| vascular/perivascular | | |
| Minimal | 2 | — |
| Syncytial Cell | | |
| Minimal | 3 | — |

alv = alveolar,
br = bronchial,
BA = bronchoalveolar

[1181] Taken together, these examinations revealed that at all time points, PBS-treated animals had a higher degree of interstitial and bronchoalveolar inflammation and more SARS-CoV-2 nucleocapsid immunoreactivity when compared to antibody-treated animals, suggesting that antibody treatment was effective at treating and clearing BA.5 infection from the lungs.

### Example 13

### SARS-CoV-2 Escape Potential by Multispecific Antibodies

[1182] The escape potential of additional multispecific antibodies was assessed using an rcVSV antibody escape assay as described above in Example 5 and by Wang et al., Science, 373:1-15 (2021).

[1183] FIG. 31 shows SARS-CoV-2 escape potential by multispecific antibodies MX1043, MX1042, MX1069 and MX1089, compared to combinations of antibodies (E12+A19-46.1+E8; E12+E8; and MX1042+MX1043) and LY1404. Shown for each antibody is the maximum concentration with >20% CPE that was passaged forward in each round of selection. Once significant viral growth appeared, supernatant was no longer passaged forward, and generation of escape variants was considered fixed. Structures for the relevant antibodies and the resulting IC50 and IC80 values are also shown.

[1184] These results show that MX1042, MX1069 and MX1089 prevented variant generation at a concentration 25-fold less than MX1043 in 7 rounds of passage.

### Example 14

### Pharmacokinetic Data

[1185] A pharmacokinetic study was performed to assess the properties of parental monoclonal antibodies F769-E12, F769-B1, E76-B8 and F770-E8, compared to bispecific antibodies MX1042 (E8×E12) and MX1043 (E12×A19-46); trispecific antibody MX1069 (A19-46×E12/E12×E8); and tetraspecific antibodies MX1089 (A19-46×B8/E8×A23-58H/L93VGLTG) and MX1206 (A19-46×E12/E8×A23-58H/L93VGLTL).

[1186] Five human FcRn-Fc mice were used for each antibody, and a single dose of 5 mg/kg was administered intravenously for all antibodies. Sera antibody levels were determined by SARS-CoV-2 S2P-coated ELISA. FIG. 32 shows the average antibody concentration measured up to 21 days after antibody dosing.

### Example 15

### mRNA Synthesis

[1187] Protein sequences for MX412 (A23-58H/B1-182L×A19-61), MX413 (A19-61×A23-58H/B1-182L), MX490 (A23-58H/B1-182L×A19-46), and MX492 (A19-46×A23-58H/B1-182L) were back-translated using Benchling to generate the corresponding DNA sequence. This DNA sequence was then cloned into the pUC57-Mini Vector (Genescript), which contains a T7 promoter, a 5′ untranslated region (UTR), and a 3′ UTR. PCR was performed to generate a template for mRNA synthesis, with a 120 nt polyA tail added. In vitro mRNA synthesis was carried out using the HiScribe® T7 High Yield RNA Synthesis Kit (New England Biolabs) from the PCR products. To incorporate modified nucleosides, pseudouridine-5′-Triphosphate (TriLink BioTechnologies; N-1019) was used instead of UTP.

[1188] The resulting mRNA was capped using the CleanCap Reagent AG (TriLink BioTechnologies; N-7113) to obtain cap1. Purification of the mRNA was performed using the MEGAclear Transcription Clean-Up Kit (Thermo Fisher Scientific; AM1908). The integrity of the RNAs was confirmed by electrophoresis on agarose gels, and then stored at −80° C. mRNA sequences for MX412, MX413, MX490 and MX492 were as follows: SEQ ID NO:695 (MX412 mRNA with signal peptide), SEQ ID NO:696 (MX412 without signal peptide), SEQ ID NO:697 (MX413 with signal peptide), SEQ ID NO:698 (MX413 without signal peptide), SEQ ID NO:699 (MX490 with signal peptide), SEQ ID NO:700 (MX490 without signal peptide), SEQ ID NO:701 (MX492 with signal peptide) and SEQ ID NO:702 (MX492 without signal peptide).

### Example 16

### mRNA-LNP

[1189] mRNA from Example 15 was incorporated into lipid nanoparticle (LNP) formulations using NanoAssemblr Ignite (Precision Nanosystems) with GenVoy ILM, following the manufacturer's instructions. The formulations were concentrated using Amicon Ultra-15 Centrifugal Filter Units (MilliporeSigma), filtered through a 0.22-μm filter, and stored at 4° C. until further use. Particle size and RNA encapsulation were assessed for all formulations. Results are shown in FIG. 33.

### In Vitro Expression

[1190] Expi293 cells were transfected with mRNA using Lipofectamine MessengerMAX Reagent (Thermo Fischer Scientific). The transfected cells were cultured in a shaker incubator at 120 rpm, 37° C., and 9% CO₂ for 5 days. Culture supernatants were harvested, filtered, and the multispecific antibodies were purified using a Protein A (GE Health Science) column. Elution of each multispecific antibody was done using Pierce IgG Elution Buffer, pH 2.0 (Thermo Fisher Scientific), followed by immediate buffer exchange with Histidine pH 6.0 and concentration using Amicon Ultra-15 Centrifugal Filter Units (MilliporeSigma). After concentration, each multispecific antibody was analyzed using reduced and non-reduced sodium dodecyl sulfate-polyacrylamide gel electrophoresis (SDS-PAGE).

### In Vivo Expression

[1191] The in vivo expression of mRNA-LNPs was evaluated using a mouse model summarized in FIG. 34. Tg32-hFc mice aged between 6-12 weeks were obtained from The Jackson Laboratory (Bar Harbor, ME). On Day 0, all mice were intravenously injected with a dose of 1 mg/kg of the mRNA-LNP. Blood and serum samples were collected at various time points (Days −7, 0, 6 hours, 1, 2, 5, 7, 10) in ethylenediaminetetraacetic acid (EDTA). Maximum bleeds were performed on Day 14, after which the mice were euthanized. The concentration of the antibody in serum was measured using quantitative ELISA with SARS-CoV-2 spike protein-coated microtiter plates and a horseradish peroxidase (HRP)-conjugated anti-human IgG antibody. Results are shown in FIG. 35.

### Example 17

### Design of Trispecific Antibodies

[1192] The trispecific antibody format follows a previously-described design configuration (DOI: 10.1126/science.aan8630). Briefly, a cross-over dual variable domain (CODV)-Ig bispecific antibody arm was heterodimerized with a conventional antibody arm using knob-into-hole (doi:10.1038/nbt0798-677) modifications in the CH3 domain of IgG1 Fc. Specifically, three classes of anti-SARS-CoV-2 neutralizing antibodies targeting spike protein receptor binding domains (RBDs) were used: B1-182.1 (class I), A19-46.1 (class II), and A19-61.1 (class III). These classes were tested in various combinations including each antibody Fv orientation and copy number to achieve bi- or tri-specificity. (As used herein, the term “Fv” represents the antigen binding domain of an antibody containing a variable heavy region and a variable light region.) These combinations were tested for best neutralizing breadth/potency and good manufacturability. In addition, “knob” (S354C/T366W), “hole” (Y349C/T366S/L368A/Y407V), and “LS” (M428L/N434S) (doi: 10.1038/nbt.1601) mutations were engineered into CH3 of the monospecific, bi- or tri-specific Fc region.

### Example 18

### Synthesis, Cloning and Expression of Multispecific Antibodies

[1193] After design of the amino acid sequences for each multispecific antibody, the four genes for each multispecific antibody were synthesized using human preferred codons (GenScript) and cloned into eukaryotic expression vectors. For each multispecific antibody expression, equal amounts of the 4 plasmid DNAs were transfected into Expi293 cells (Life Technology) using Expi293 transfection reagent (Life Technology) as previously reported (DOI: 10.1126/science.aan8630). The transfected cells were cultured in a shaker incubator at 120 rpm, 37° C., 9% CO2 for 4˜5 days.

[1194] Culture supernatants were harvested and filtered, the multispecific antibodies were purified over a Protein A (GE Health Science) column. Each multispecific antibody was eluted with IgG elution buffer (Pierce), immediately buffer exchanged with phosphate buffered saline (PBS) and concentrated using Centricon Plus-70 (Millipore Sigma) membrane filter unit. After concentration, each multispecific antibody was applied to a Superdex 200 16/600 size exclusion column (Cytiva) to remove aggregates and different species in the preparation. The fractions were then analyzed on reduced and non-reduced SDS-PAGE to identify the fractions that contained the monomeric multispecific antibody before combining them. The pooled fractions were then further concentrated, aliquoted and analyzed by SDS-PAGE as well as an analytical SEC column (Superdex 200 16/600) to verify purity.

[1195] FIG. 36 shows an exemplary configuration of a monospecific, trivalent cross-over dual variable (CODV) immunoglobulin antibody made utilizing variable fragments (Fv) from B1-182.1 (Fv182.1, dotted). The Fc region contains a knob-into-hole modification to increase yield and correct association of heavy chains.

[1196] FIG. 37A-37C shows exemplary configurations of bispecific, trivalent CODV immunoglobulin antibodies made utilizing variable fragments (Fv) from B1-182.1 (Fv182.1, dotted) and A19-61.1 (Fv61.1, grid). The Fc region contains a knob-into-hole modification to increase yield and correct association of heavy chains.

[1197] FIG. 38A-38D shows exemplary configurations of trispecific, trivalent CODV immunoglobulin antibodies made utilizing variable fragments (Fv) from B1-182.1 (“182.1” or “Fv182 Class I”, dotted), A19-46.1 (“46.1” or “Fv46 Class II”, striped) and A19-61.1 (“61.1” or “Fy61 Class III”, grid). The Fe region contains a knob-into-hole modification to increase yield and correct association of heavy chains.

[1198] FIG. 39A shows purity of CODV immunoglobulin antibodies evaluated under non-reducing (nr) and reducing (r) conditions on a Coomassie SDS-PAGE gel (representative gels shown). Antibody sequences are shown below in Table 34.

TABLE 34
Sequences

| Antibody | SEQ ID NOs: |
|---|---|
| 182.1/182.1-61.1 | 113, 114, 119-122 |
| 182.1/61.1-182.1 | 93-96, 119-122 |
| 61.1/182.1-182.1 | 97-100, 115-118 |
| 61.1/61.1-182.1 | 97-100, 119-122 |
| 61.1/182.1-61.1 | 97-100, 113-114, 123, 124 |
| 46.1/61.1-182.1 | 87-89, 119-122 |
| 61.1/46.1-182.1 | 97-100, 83-86 |
| 61.1/182.1-46.1 | 97-100, 109-112 |

[1199] FIG. 39B shows CODV immunoglobulin bispecific and trispecific antibody traces shown before (top row) and after size exclusion chromatography (SEC) (bottom row). The dotted box indicates the fractions combined to make final preparations of the indicated multispecific antibodies. The bottom row shows analytic SEC traces for the purified multispecific antibodies. Shown are representative traces from production runs of antibodies. Antibody properties and yields are shown in Table 35.

TABLE 35
Biochemical Properties and Production Yields Following
SEC Purification For SARS-CoV-2 CODV Antibodies

| | Molecular | | Extinction | |
|---|---|---|---|---|
| | Weight | Isoelectric | Coefficient. | Yield |
| ID | (kDa) | Point | (M⁻¹ cm⁻¹) | (mg/L) |
| 182.1/182.1-182.1 | 173.1 | 8.38 | 267120 | 14.5 |
| 182.1/182.1-61.1 | 173.4 | 8.39 | 271465 | 3.94 |
| 182.1/61.1-182.1 | 173.4 | 8.39 | 271465 | 2.6 |
| 61.1/182.1-182.1 | 173.4 | 8.39 | 271465 | 4.37 |
| 61.1/61.1-182.1 | 173.7 | 7.81 | 275810 | 1.6 |
| 61.1/182.1-61.1 | 173.7 | 7.81 | 275810 | 9.6 |
| 46.1/61.1-182.1 | 173.7 | 8.32 | 280280 | 9.24 |
| 46.1/182.1-61.1 | 173.7 | 8.32 | 280280 | 16.41 |
| 61.1/46.1-182.1 | 173.7 | 8.32 | 280280 | 7.94 |
| 61.1/182.1-46.1 | 173.7 | 8.32 | 280280 | 17.72 |

### Example 19

### Pseudovirus Neutralization Assay

[1200] The pseudotyped neutralization potency (IC50 and IC80) of multispecific antibodies described in Examples 1 and 2 was then determined. Specifically, S-containing lentiviral pseudovirions were produced by co-transfection of packaging plasmid pCMVdR8.2, transducing plasmid pHR′ CMV-Luc, a TMPRSS2 plasmid and S plasmids from SARS-CoV-2 variants into 293T cells using Lipofectamine 3000 transfection reagent (L3000-001, ThermoFisher Scientific, Asheville, NC). 293T-ACE2 cells (provided by Dr. Michael Farzan) were plated into 96-well white/black Isoplates (PerkinElmer, Waltham, MA) at 75,00 cells per well the day before infection of SARS CoV-2 pseudovirus. Serial dilutions of monoclonal antibodies (mAbs) were mixed with titrated pseudovirus, incubated for 45 minutes at 37° C. and added to cells in triplicate. Following 2 h of incubation, wells were replenished with 150 ml of fresh media. Cells were lysed 72 h later, and luciferase activity was measured with Microbeta (Perking Elmer). Percent neutralization and neutralization IC50 and IC80 values were calculated using GraphPad Prism 8.0.2.

[1201] Table 36 shows IC50 and IC80 values for neutralization of the SARS-CoV-2 original Wuhan strain (WT), SARS-CoV-2 D614G spike protein mutant (D614G), Alpha variant (B.1.1.7), Beta variant 1 (B.1.35.1v1), Gamma variant (P.1), Delta variants (B.1.617.2 and AY.1), Kappa variant (B.1.617.1), Iota variant (B.1.526), Lambda variant (C.37), Mu variant (B.1.621), C.1.2 variant, and Omicron variants (BA1.1.529, BA.1, BA.2, BA.2.12.1 and BA.4/5). These results show that the antibodies tested potently inhibited many to all variants tested.

TABLE 36

| | WT | | D614G | | B.1.1.7 | | B.1.351.v1 |
|---|---|---|---|---|---|---|---|
| Name | IC50 | IC80 | IC50 | IC80 | IC50 | IC80 | IC50 |
| A23_58.1 | | | | | 0.0329 | 0.1041 | 0.1227 |
| B1-182.1 | 0.0264 | 0.0692 | 0.0171 | 0.0359 | 0.0262 | 0.0844 | 0.0357 |
| 58H_182L | | | | | 0.0174 | 0.0376 | 0.0305 |
| A19-61.1 | 0.1725 | 0.4078 | 0.0550 | 0.1258 | 0.1747 | 0.3251 | 0.0686 |
| A19-46.1 | 0.2633 | 0.7783 | 0.1379 | 0.3893 | 0.1899 | 0.4859 | 0.8074 |
| 58H_182L/58H_182L/58H_182L | 0.0077 | 0.0223 | 0.0076 | 0.0204 | 0.0183 | 0.0398 | 0.0111 |
| 182.1/182.1-61.1 | 0.0321 | 0.0966 | 0.0178 | 0.0447 | 0.0385 | 0.1148 | 0.0358 |
| 182.1/61.1-182.1 | 0.0694 | 0.1891 | 0.0406 | 0.0812 | 0.0918 | 0.2084 | 0.0446 |
| 61.1/182.1-182.1 | 0.2545 | 0.6804 | 0.0495 | 0.1236 | 0.2383 | 0.3381 | 0.1189 |
| 61.1/61.1-182.1 | | | 0.0620 | 0.1181 | | | 0.0586 |
| 61.1/182.1-61.1 | | | 0.0262 | 0.0583 | | | 0.0626 |
| 46.1/61.1-182.1 | 0.2969 | 0.5228 | 0.0881 | 0.1538 | 0.2829 | 0.5068 | 0.1550 |
| 46.1/182.1-61.1 | 0.1473 | 0.3613 | 0.0346 | 0.0769 | 0.1008 | 0.2644 | 0.0384 |
| 61.1/46.1-182.1 | 0.0769 | 0.2880 | 0.0326 | 0.0764 | 0.0784 | 0.2296 | 0.0548 |
| 61.1/182.1-46.1 | 0.3553 | 0.5566 | 0.0930 | 0.1539 | 0.2582 | 0.2992 | 0.1455 |
| 58H_182L/58H_182L-61.1 | | | | | 0.0412 | 0.1176 | 0.0582 |
| 58H_182L/61.1-58H_182L | | | | | 0.0967 | 0.2177 | 0.0635 |
| 46.1/61.1-58H_182L | | | | | 0.3513 | 0.4160 | 0.2423 |
| 61.1/46.1-58H_182L | | | | | 0.1005 | 0.3097 | 0.1059 |

| | B.1.351.v1 | P.1 | | B.1.617.2 | |
|---|---|---|---|---|---|
| Name | IC80 | IC50 | IC80 | IC50 | IC80 |
| A23_58.1 | 0.3389 | 0.0097 | 0.0437 | 0.0133 | 0.0358 |
| B1-182.1 | 0.1390 | 0.0182 | 0.0429 | 0.0099 | 0.0254 |
| 58H_182L | 0.0966 | 0.0116 | 0.0237 | 0.0104 | 0.0205 |
| A19-61.1 | 0.1127 | 0.1352 | 0.2885 | 0.2090 | 0.2917 |
| A19-46.1 | 2.0716 | 0.2600 | 0.7000 | >66.7 | >66.7 |
| 58H_182L/58H_182L/58H_182L | 0.0339 | 0.003468 | 0.010518 | 0.003844 | 0.009797 |
| 182.1/182.1-61.1 | 0.0806 | 0.019834 | 0.064068 | 0.011632 | 0.033888 |
| 182.1/61.1-182.1 | 0.1080 | 0.044369 | 0.117965 | 0.014564 | 0.036509 |
| 61.1/182.1-182.1 | 0.2217 | 0.214617 | 0.537649 | 0.068636 | 0.141241 |
| 61.1/61.1-182.1 | 0.1268 | | | 0.1316 | 0.2455 |
| 61.1/182.1-61.1 | 0.1369 | | | 0.0580 | 0.1217 |
| 46.1/61.1-182.1 | 0.1989 | 0.1999 | 0.4556 | 0.0859 | 0.1828 |
| 46.1/182.1-61.1 | 0.0816 | 0.0284 | 0.0887 | 0.2503 | 0.8762 |
| 61.1/46.1-182.1 | 0.1262 | 0.0451 | 0.1553 | 0.1540 | 0.1955 |
| 61.1/182.1-46.1 | 0.1799 | 0.2072 | 0.4977 | 0.3807 | 0.4716 |
| 58H_182L/58H_182L-61.1 | 0.1363 | 0.020744 | 0.082974 | 0.018507 | 0.056465 |
| 58H_182L/61.1-58H_182L | 0.1450 | 0.056899 | 0.106242 | 0.035644 | 0.062195 |
| 46.1/61.1-58H_182L | 0.3083 | 0.2459 | 0.2713 | 0.1568 | 0.2862 |
| 61.1/46.1-58H_182L | 0.1949 | 0.0455 | 0.1085 | 0.2301 | 0.2747 |

| | B.1.617.1 | | B.1.526 | | C.37 | |
|---|---|---|---|---|---|---|
| Name | IC50 | IC80 | IC50 | IC80 | IC50 | IC80 |
| A23_58.1 | | | | | | |
| B1-182.1 | 0.0261 | 0.0860 | 0.0639 | 0.1831 | 0.0049 | 0.0150 |
| 58H_182L | | | | | | |
| A19-61.1 | 0.0815 | 0.1732 | 0.0418 | 0.0836 | 0.1099 | 0.1865 |
| A19-46.1 | >66.7 | >66.7 | 0.8033 | 1.8820 | >66.7 | >66.7 |
| 58H_182L/58H_182L/58H_182L | | | | | | |
| 182.1/182.1-61.1 | 0.0105 | 0.0311 | 0.0314 | 0.0711 | 0.0083 | 0.0144 |
| 182.1/61.1-182.1 | 0.0142 | 0.0403 | 0.0446 | 0.0660 | 0.0103 | 0.0203 |
| 61.1/182.1-182.1 | 0.0405 | 0.0903 | 0.1146 | 0.1858 | 0.0371 | 0.0629 |
| 61.1/61.1-182.1 | | | | | | |
| 61.1/182.1-61.1 | | | | | | |
| 46.1/61.1-182.1 | 0.1047 | 0.2997 | 0.0694 | 0.1060 | 0.0902 | 0.2529 |
| 46.1/182.1-61.1 | 0.4675 | 0.9759 | 0.0362 | 0.0670 | 0.2156 | 0.6651 |
| 61.1/46.1-182.1 | 0.0753 | 0.1903 | 0.0525 | 0.0854 | 0.0690 | 0.1149 |
| 61.1/182.1-46.1 | 0.2051 | 0.3456 | 0.0808 | 0.1168 | 0.2133 | 0.2801 |
| 58H_182L/58H_182L-61.1 | | | | | | |
| 58H_182L/61.1-58H_182L | | | | | | |
| 46.1/61.1-58H_182L | | | | | | |
| 61.1/46.1-58H_182L | | | | | | |

| | B.1.621 | | C.1.2 | | AY.1 | |
|---|---|---|---|---|---|---|
| Name | IC50 | IC80 | IC50 | IC80 | IC50 | IC80 |
| A23_58.1 | 0.1240 | 0.2600 | 0.0287 | 0.0656 | | |
| B1-182.1 | 0.0695 | 0.2188 | 0.0549 | 0.1096 | 0.0080 | 0.0192 |
| 58H_182L | 0.0402 | 0.1081 | 0.0207 | 0.0348 | | |
| A19-61.1 | 0.2639 | 0.4296 | 8.4254 | | 0.0557 | 0.1207 |
| A19-46.1 | 1.3387 | 3.8125 | 11.6200 | 21.0215 | >66.7 | >66.7 |
| 58H_182L/58H_182L/58H_182L | 0.0201 | 0.0581 | 0.0042 | 0.0098 | 0.0113 | 0.0247 |
| 182.1/182.1-61.1 | 0.0710 | 0.1460 | 0.0381 | 0.0866 | 0.0049 | 0.0138 |
| 182.1/61.1-182.1 | 0.1122 | 0.2471 | 0.0794 | 0.0944 | 0.0099 | 0.0154 |
| 61.1/182.1-182.1 | 0.1947 | 0.3113 | | | 0.0412 | 0.0594 |
| 61.1/61.1-182.1 | | | | | | |
| 61.1/182.1-61.1 | | | | | | |
| 46.1/61.1-182.1 | 0.2226 | 0.3168 | 0.1148 | 0.2665 | 0.0441 | 0.1220 |
| 46.1/182.1-61.1 | 0.0389 | 0.1157 | | | 0.0882 | 0.4172 |
| 61.1/46.1-182.1 | 0.1559 | 0.3001 | 0.0654 | 0.1943 | 0.0438 | 0.0845 |
| 61.1/182.1-46.1 | 0.2716 | 0.4677 | | | 0.2629 | 0.2880 |
| 58H_182L/58H_182L-61.1 | 0.0966 | 0.1854 | 0.0512 | 0.0650 | | |
| 58H_182L/61.1-58H_182L | 0.2409 | 0.2656 | 0.0071 | 0.0194 | | |
| 46.1/61.1-58H_182L | 0.2862 | 0.3135 | 0.2185 | 0.4543 | | |
| 61.1/46.1-58H_182L | 0.2698 | 0.2858 | 0.0681 | 0.0878 | | |

| | BA1.1.529 | | BA.1 | | BA.2 | | BA.2.12.1 | | BA.4/5 | |
|---|---|---|---|---|---|---|---|---|---|---|
| Name | IC50 | IC80 | IC50 | IC80 | IC50 | IC80 | IC50 | IC80 | IC50 | IC80 |
| A23_58.1 | | | 0.8529 | 4.2362 | 1.7240 | 6.1249 | 0.6471 | 4.9635 | >66.7 | >66.7 |
| B1-182.1 | 2.5540 | 6.4690 | 1.0322 | 4.4388 | 2.1151 | 8.5007 | 0.7393 | 5.9249 | >66.7 | >66.7 |
| 58H_182L | | | 0.3638 | 1.3930 | 0.6631 | 2.8936 | 0.8298 | 3.2735 | >66.7 | >66.7 |
| A19-61.1 | >66.7 | >66.7 | >66.7 | >66.7 | 0.0607 | 0.1699 | 0.1104 | 0.2980 | 0.1282 | 0.3220 |
| A19-46.1 | 1.8360 | 2.8400 | 0.9580 | 2.2810 | 0.6896 | 2.2272 | >66.7 | >66.7 | >66.7 | >66.7 |
| 58H_182L/58H_182L/58H_182L | | | 3.9134 | 24.2954 | 2.3442 | 25.0890 | 4.2697 | >66.7 | >66.7 | >66.7 |
| 182.1/182.1-61.1 | 47.2166 | | 27.2608 | 38.1161 | 0.0632 | 0.1724 | 0.1446 | 0.5118 | 10.0891 | 19.6789 |
| 182.1/61.1-182.1 | 1.2104 | | 1.0695 | 8.1047 | 0.0160 | 0.0626 | 0.0381 | 0.0788 | 2.4939 | 6.9402 |
| 61.1/61.1-182.1 | >66.7 | >66.7 | 0.0677 | 0.1171 | 0.0698 | 0.2894 | 0.0973 | 0.2350 | >66.7 | >66.7 |
| 61.1/182.1-61.1 | >66.7 | >66.7 | 0.0415 | 0.0962 | 0.0507 | 0.1275 | 0.0427 | 0.2009 | >66.7 | >66.7 |
| 61.1/182.1-182.1 | >66.7 | | >66.7 | >66.7 | 0.0859 | 0.2015 | 0.3427 | 0.6587 | 1.8459 | 6.0570 |
| 46.1/61.1-182.1 | 0.8634 | | 0.7366 | 1.8668 | 0.0400 | 0.0900 | 0.3527 | 1.1248 | 11.2895 | 24.6235 |
| 46.1/182.1-61.1 | 1.8580 | | 1.4133 | 3.9563 | 0.0448 | 0.1123 | 1.3441 | 2.4544 | 15.4292 | 36.9370 |
| 61.1/46.1-182.1 | 0.1666 | | 0.1982 | 0.4505 | 0.0255 | 0.0683 | 0.0488 | 0.1064 | 1.2141 | 2.3808 |
| 61.1/182.1-46.1 | 8.3726 | | 5.0902 | 23.0975 | 0.0195 | 0.0663 | 0.3086 | 0.6151 | 1.9607 | 4.4528 |
| 58H_182L/58H_182L-61.1 | | | 22.1760 | 48.0214 | 0.1301 | 0.4851 | 0.6181 | 1.2993 | 16.1758 | 47.7654 |
| 58H_182L/61.1-58H_182L | | | 2.7327 | 11.6180 | 0.0300 | 0.0960 | 0.0532 | 0.1416 | 2.3381 | 6.5572 |
| 46.1/61.1-58H_182L | | | 1.3652 | 3.0719 | 0.0283 | 0.1451 | 0.3664 | 0.7078 | 8.1859 | 19.2642 |
| 61.1/46.1-58H_182L | | | 0.2016 | 0.6393 | 0.0206 | 0.1003 | 0.1193 | 0.2270 | 2.1978 | 6.3612 |

### Example 20

### Validation of Antibody Binding to RBD Mutation Proteins by ELISA and Neutralization

[1202] Binding of multispecific antibodies of Examples 17 and 18 to viral spike receptor-binding domain (RBD) mutations was then validated. The RBD mutations that were used contained one or more of the previously-identified knockout mutations for Fv182 (F486S), Fv46 (L452R) and Fv61 (K444E). For the validation assay, MaxiSorp™ Immuno Plates (Thermo Fisher Scientific) were coated with 1 μg/mL of SARS-CoV-2 WA-1 RBD or RBD with single, double or triple mutations (F486S, E444K, L452R, F486S/E444K, F486S/L452R, and F486S/E444K/L452R) in PBS at 4° C. overnight. After standard washes and blocking, plates were incubated with serial dilutions of antibody for one hour at room temperature. Anti-human IgG Fc gamma-specific horseradish peroxidase conjugate (Jackson Laboratory) was used to detect binding of antibody to the RBD proteins. The plates were then washed and developed with 3,5,3′5′-tetramethylbenzidine (TMB) (KPL, Gaithersburg, MD). After stopping the reaction with 1N H₂SO₄ (Fisher), optical density (OD) at 450 nM was read with a SpectraMax® Plus microplate reader (Molecular Devices).

[1203] FIG. 40A shows cross-over the dual variable immunoglobulin antibody designs used in this example.

[1204] FIG. 40B shows the expected binding of Fv182.1 (“Fv182”), Fv46.1 (“Fv46”), and Fv61.1 (“Fv61”) to RBD proteins containing the indicated Fv isolating mutations that were selected to knockout binding a single component Fv, while leaving binding of the remain Fv components unchanged.

[1205] FIG. 40C-40E shows validation of multispecific Fv binding activity using Fv isolating mutations in RBD and enzyme-linked immunosorbent assay (ELISA). Shown is ELISA binding for parental component antibody controls (FIG. 40C, B1-182.1, A19-46.1, and A19-61.1), bispecific antibodies (FIG. 40D, 182.1/182.1-61.1, 182.1/61.1-182.1, 61.1/182.1-182.1, 61.1/61.1-182.1 and 61.1/182.1-61.1), and trispecific antibodies (FIG. 40E, 46.1/61.1-182.1, 46.1/182.1-61.1, 61.1/46.1-182.1 and 61.1/182.1-46.1) against WA-1 RBD (wt) or RBD proteins containing one or more Fv-specific mutations shown and chosen to interrogate binding of one Fv component at a time in each multispecific.

[1206] These results show that the candidate multispecific antibodies had the expected binding properties. For example, F486S/K444E showed binding to the Fv46 component of the trispecific antibodies because it does not allow binding of Fv182 and Fv61. And, Fv domains in each multispecific antibody recognized the unmutated epitopes similarly to wild type RBD.

[1207] For further validation, an assay was performed to test the ability of each antibody to neutralize spike protein point mutants that eliminated binding of one component and showed that each multispecific maintained neutralization. Table 37 shows the neutralization of candidate multispecific antibodies against D614G or mutants that target Fv182 (“B1-182.1 Escape”; F486S/D614G), Fv46 (“A19-46.1 Escape”; L452R/D614G) and Fv46 (“A19-46.1 Escape”; K444E/D614G).

TABLE 37

| | | | | B1-182.1 Escape | | A19-46.1 Escape | | A19-46.1 Escape | |
|---|---|---|---|---|---|---|---|---|---|
| | | D614G | | F486S/D614G | | L452R/D614G | | K444E/D614G | |
| | | IC₅₀ | IC₈₀ | IC₅₀ | IC₈₀ | IC₅₀ | IC₈₀ | IC₅₀ | IC₈₀ |
| | B1-182.1 | 15.7 | 34.9 | >67,000 | >67,000 | 25.0 | 75.8 | 11.1 | 29.9 |
| | A19-46.1 | 44.1 | 96.5 | 75.2 | 165.8 | 206.9 | 444.2 | >67,000 | >67,000 |
| | A19-61.1 | 113.3 | 339.2 | 132.9 | 390.0 | >67,000 | >67,000 | 472.1 | 1504 |
| Bispecific | 182.1/182.1-61.1 | 11.4 | 36.5 | 403.8 | 1320 | 24.1 | 112.6 | 7.0 | 56.1 |
| and | 182.1/61.1-182.1 | 15.8 | 46.8 | 354.1 | 789.6 | 38.5 | 65.2 | 10.1 | 35.8 |
| Trivalent | 61.1/182.1-182.1 | 67.4 | 128.4 | 320.4 | 1008 | 145.7 | 311.6 | 260.6 | 1090 |
| | 61.1/61.1-182.1 | n.t. | n.t. | n.t. | n.t. | n.t. | n.t. | n.t. | n.t. |
| | 61.1/182.1-61.1 | n.t. | n.t. | n.t. | n.t. | n.t. | n.t. | n.t. | n.t. |
| Trispecific | 46.1/61.1-182.1 | 48.7 | 119.2 | 112.1 | 243.2 | 201.2 | 602.8 | 189.1 | 487.4 |
| and | 46.1/182.1-61.1 | 31.7 | 62.9 | 80.0 | 270.8 | 278.7 | 909.9 | 46.9 | 140.5 |
| Trivalent | 61.1/46.1-182.1 | 30.8 | 48.4 | 68.6 | 163.9 | 232.8 | 934.0 | 42.0 | 139.9 |
| | 61.1/182.1-46.1 | 82.0 | 183.3 | 82.6 | 212.3 | 1010 | 2097 | 89.3 | 356.1 |

[1208] Taken together, these findings verified the Fvs within each candidate multispecific antibody functioned as expected.

### Example 21

### Identification of Potential Binding Modes of CODV

### to SARS-CoV-2 Spike Protein by Negative Stain-Electron Microscopy

[1209] Next, potential binding modes of CODV to SARS-CoV-2 spike protein were identified by negative stain-electron microscopy. For negative stain-electron microscopy, SARS-CoV-2 spike proteins were mixed with CODV or Fab at a molar ratio of 1:1.2, incubated at room temperature for 10 minutes, and diluted to a concentration of approximately 0.02 mg spike protein/mL with 10 mM HEPES, pH 7.4, 150 mM NaCl. To make a grid, 4.8 μL of the diluted sample was placed on a freshly glow-discharged carbon-coated copper grid for 15 seconds. The drop on the grid was then wicked away with filter paper, and the grid was washed and wicked three times. The same volume of 0.75% uranyl formate was added to the grid to negatively stain protein molecules adsorbed to the carbon and immediately wicked away. After staining three times, the grid was allowed to air-dry. Datasets were collected using a Thermo Scientific™ Talos™ F200C transmission electron microscope equipped with a Ceta camera at 200 kV. The nominal magnification was 57,000×, corresponding to a pixel size of 2.53 Å, and the defocus was set at −2 μm. Data was collected automatically using EPU. Single particle analysis was performed using CryoSPARC 3.0.

[1210] FIG. 41A shows a schematic illustration of arrangement of antibody variable domains in different CODVs. The domains are dotted, striped, grid, and gray for Fv182.1 (182.1), Fv46.1 (46.1), Fv61.1 (61.1) and constant domains, respectively.

[1211] FIG. 41B shows combinations of RBD mutations on the SARS-CoV-2 spike protein designed to distinguish different binding modes of CODV.

[1212] FIG. 41C is a schematic of CODV 61.1-182.1 (left) and binding of the CODV 61.1-182.1 to spike protein mutants (middle left and right). For clarity, the Fv domain that is not able to bind to the mutant is colored black. CODV binding to K444E/L452R mutant was observed, indicating CODV 61.1-182.1 can bind to spike protein through Fv182 domain (middle left). However, no CODV was observed to bind the L452R/F486S mutant (middle right), suggesting that the CODV 61.1-182.1 cannot bind through the Fv61 domain in the trimer context. A model of the CODV 61.1-182.1 bound to the SARS-CoV-2 spike protein is shown in the allowed Fv182-binding mode (right). For clarity, only one CODV is shown to bind to the spike protein in RBD-up conformation. The white scale bar represents 10 nm.

[1213] FIG. 41D is a schematic of CODV 182.1-61.1 (left) and binding of the CODV 182.1-61.1 to spike protein mutants (middle left and right). For clarity, the Fv domain that is not able to bind to the mutant is colored black. CODV was observed to bind both K444E/L452R and L452R/F486S mutants, indicating the CODV 182.1-61.1 can bind to spike protein through either Fv182 domain (middle left) or Fv61 domain (middle right). Models of the CODV 182.1-61.1 bound to the SARS-CoV-2 spike protein are shown in both Fv182.1-binding and Fv61.1-binding modes (right). The scale is the same as in FIG. 41C.

[1214] FIG. 41E is a schematic of CODV 46.1-182.1 (left) and binding of the CODV 46.1-182.1 to spike protein mutants (middle left and right). For clarity, the Fv domain that is not able to bind to the mutant is colored black. CODV was observed to bind both K444E/L452R and K444E/F486S mutants, indicating the CODV 46.1-182.1 can bind to the spike protein through both Fv182 and Fv46 domains (middle left and right). Models of the CODV 46.1-182.1 bound to the SARS-CoV-2 spike protein are shown to bind through Fv182 and Fv46-binding modes (right). The scale is the same as in FIG. 41C.

[1215] FIG. 41F is a schematic of CODV 182.1-46.1 (left) and binding of the CODV 182.1-46.1 to spike protein mutants (middle left and right). For clarity, the Fv domain that is not able to bind to the mutant is colored black. CODV was observed to bind K444E/L452R, indicating the CODV 182.1-46.1 can bind to the spike protein through the Fv182.1 domain (middle left). However, no CODV was observed to bind the K444E/F486S mutant (middle right), suggesting that the CODV 182.1-46.1 cannot bind through the Fv46 domain in the trimer context. Model of the CODV 182.1-46.1 bound to the SARS-CoV-2 spike protein is shown to bind through the allowed Fv182 domain (right). The scale is the same as in FIG. 41C.

[1216] FIG. 41G shows CODV 46.1-182.1- and 182.1-46.1-induced aggregation of the Omicron spike protein. NSEM micrographs revealed that under conditions when CODV 182.1-46.1 only formed small complexes with BA.1 spike trimers, CODV 46.1-182.1 formed large aggregates. This suggests that CODV 46.1-182.1 can efficiently promote inter-spike crosslinking.

[1217] While the monovalent 61.1 arm of 61.1/46.1-182.1 is prevented from binding to the Omicron BA.1 spike due to mutations, it is possible that its presence in the full immunoglobulin might impact the ability of the CODV 46.1-182.1 arm to aggregate spikes. The spike-aggregating potential of 61.1/46.1-182.1 using NSEM and noted large amounts of aggregation (FIG. 41H). Taken together, these results illustrate how in the context of spike trimers, both the location of epitopes within RBD and CODV position can impact binding, aggregative potential and neutralization. Specifically, Fvs with an angle of approach vertical to the trimer apex such as Fv182 are likely to have greater flexibility for positioning with trivalent mAb designs, likely due to freedom from steric constraints, and consistent with higher potency neutralization by this Fv. In contrast, Fv46 has a lateral or angled approach suggesting that antibodies that bind with this angle of approach may be subject to steric constraints that are revealed by position-dependence of the Fv for optimal engagement and neutralization.

### Example 22

### SARS-CoV-2 Escape Potential by Single Antibodies, Combinations and Multispecific Antibodies

[1218] The escape potential of the candidate multispecific antibodies was assessed using an rcVSV antibody escape assay. Selection of virus escape variants was conducted as previously described by Wang et al., Science, 373:1-15 (2021). Briefly, an equal volume of clonal population of replication competent vesicular stomatitis virus (rcVSV) with its native glycoprotein replaced by the Wuhan-1 spike protein (rcVSV SARS CoV-2) at an MOI of 0.01 was mixed with serial dilutions of antibodies (5-fold) in cell media to give the desired final antibody concentration. Antibody cocktails were mixed at equal ratios. Virus:antibody mixtures were incubated at 37° C. for 1 hour prior to being added to Vero E6 cells. Virus replication was assessed 72 hours after infection in the presence of selected antibodies. Supernatants from well with the highest concentration of antibody which showed evidence of viral replication (>20% cytopathic effect) was passaged into the subsequent rounds of selection. Infection, monitoring, and collection of supernatants was performed as in the initial round.

[1219] FIG. 42 shows results from three independent experiments showing SARS-CoV-2 escape potential of T3_V3 (having 61.1, 46.1 and 182.1 binding regions as indicated in FIG. 42), compared to an antibody having binding regions for 182.1, 61.1 and 46.1 (182.1+61.1+46.1); an antibody having binding regions for 182.1 (182.1); bebtelovimab (LY1404); and an AZD7442 cocktail (2196+2130). T3_V3 was better at preventing the acquisition of resistance than 182.1, LY1404 and AZD7442. In addition, the maximum concentration at which there was a loss of neutralization was 0.016 μg/mL for T3_V3 in all three experiments.

### Example 23

### E8 mAb Glycosylation Mutations

[1220] N62Q and N62S mutations were made in the E8 heavy chain variable domain (VH) sequence, which remove a high mannose glycosylate residue or moiety. The specific sequences prepared are listed in Table 38.

TABLE 38

| SEQ ID NO: | Description |
|---|---|
| 279 | E8 VH wild type (N62) - peptide |
| 778 | E8 VH wild type (N62) - DNA |
| 779 | E8 VH N62Q - peptide |
| 780 | E8 VH N62Q - DNA |
| 781 | E8 VH N62S - peptide |
| 782 | E8 VH N62S - DNA |
| 785 | E8 VH N62Q in expression plasmid - peptide |
| 786 | E8 VH N62Q in expression plasmid - DNA |
| 787 | E8 VH N62S in expression plasmid - peptide |
| 788 | E8 VH N62S in expression plasmid - DNA |

[1221] The E8 VL sequence of SEQ ID NO:275 was used for preparing the antibodies (corresponding to SEQ ID NO:783 (E8 VL in expression vector—peptide) and SEQ ID NO:784 (E8 VL in expression plasmid—DNA)).

[1222] Human FcRn transgenic mice (C57BL/6, B6.mFcRn−/−hFcRn Tg32 line from The Jackson Laboratory) were used to assess the pharmacokinetics of the antibodies. Each animal was infused intravenously with 5 mg antibody/kg of body weight. Whole blood samples were collected at days 1, 2, 5, 7, 9, 14, 21, 28, and 35. Serum was separated by centrifugation. Serum antibody levels were measured by ELISA. All mice were bred and maintained under pathogen-free conditions at an American Association for Assessment and Accreditation of Laboratory Animal Care International-accredited animal facility at the National Institute of Allergy and Infectious Diseases and housed in accordance with the procedures outlined in the Guide for the Care and Use of Laboratory Animals. All mice were between 6 and 13 weeks of age.

[1223] FIG. 43 shows the resulting serum concentration of E8 glycosylation mutant antibodies in g/mL.

[1224] All publications, patents and patent applications mentioned in this application are herein incorporated in their entirety by reference into the specification, to the same extent as if each individual publication, patent or patent application was specifically and individually indicated to be incorporated herein by reference. In addition, citation or identification of any reference in this application shall not be construed as an admission that such reference is available as prior art to the present invention. To the extent that section headings are used, they should not be construed as necessarily limiting.

1-6. (canceled)

7. An antigen binding polypeptide complex comprising a first polypeptide and a second polypeptide;
wherein the first polypeptide has a structure represented by:
VL1-L1-VL2-L2-VH2-L3-VH1-L4-Fc;
VL1-L1-VH2-L2-VL2-L3-VH1-L4-Fc;
VH1-L5-VH2-L6-VL2-L7-VL1-L8-Fc; or
VH1-L5-VL2-L6-VH2-L7-VL1-L8-Fc;
wherein the second polypeptide has a structure represented by:
Fc;
VL3-L9-VL4-L10-VH4-L11-VH3-L12-Fc;
VL3-L9-VH4-L10-VL4-L11-VH3-L12-Fc;
VH3-L13-VH4-L14-VL4-L15-VL3-L16-Fc; or
VH3-L13-VL4-L14-VH4-L15-VL3-L16-Fc;
wherein:
VL1 is a first immunoglobulin light chain variable region that specifically binds to a SARS-CoV-2 protein;
VL2 is a second immunoglobulin light chain variable region that specifically binds to a SARS-CoV-2 protein;
VL3 is a third immunoglobulin light chain variable region that specifically binds to a SARS-CoV-2 protein;
VL4 is a fourth immunoglobulin light chain variable region that specifically binds to a SARS-CoV-2 protein;
VH1 is a first immunoglobulin heavy chain variable region that specifically binds to a SARS-CoV-2 protein;
VH2 is a second immunoglobulin heavy chain variable region that specifically binds to a SARS-CoV-2 protein;
VH3 is a third immunoglobulin heavy chain variable region that specifically binds to a SARS-CoV-2 protein;
VH4 is a fourth immunoglobulin heavy chain variable region that specifically binds to a SARS-CoV-2 protein;
Fc is a region comprising an immunoglobulin heavy chain constant region 2 (CH2), an immunoglobulin heavy chain constant region 3 (CH3), and optionally, an immunoglobulin hinge; and
L1-L16 are amino acid linkers.

8. An antigen binding polypeptide complex according to claim 7 comprising a first polypeptide and a second polypeptide;
wherein the first polypeptide has a structure represented by:
VL1-L1-VL2-L2-VH2-L3-VH1-L4-Fc; or
VH1-L5-VH2-L6-VL2-L7-VL1-L8-Fc;
wherein the second polypeptide has a structure represented by:
Fc;
VL3-L9-VL4-L10-VH4-L11-VH3-L12-Fc; or
VH3-L13-VH4-L14-VL4-L15-VL3-L16-Fc;
wherein:
VL1 is a first immunoglobulin light chain variable region that specifically binds to a SARS-CoV-2 protein;
VL2 is a second immunoglobulin light chain variable region that specifically binds to a SARS-CoV-2 protein;
VL3 is a third immunoglobulin light chain variable region that specifically binds to a SARS-CoV-2 protein;
VL4 is a fourth immunoglobulin light chain variable region that specifically binds to a SARS-CoV-2 protein;
VH1 is a first immunoglobulin heavy chain variable region that specifically binds to a SARS-CoV-2 protein;
VH2 is a second immunoglobulin heavy chain variable region that specifically binds to a SARS-CoV-2 protein;
VH3 is a third immunoglobulin heavy chain variable region that specifically binds to a SARS-CoV-2 protein;
VH4 is a fourth immunoglobulin heavy chain variable region that specifically binds to a SARS-CoV-2 protein;
Fc is a region comprising an immunoglobulin heavy chain constant region 2 (CH2), an immunoglobulin heavy chain constant region 3 (CH3), and optionally, an immunoglobulin hinge; and
L1-L16 are amino acid linkers.

9-14. (canceled)

15. An antigen binding polypeptide complex comprising a first polypeptide and a second polypeptide;
wherein the first polypeptide has a structure represented by:
VL1-L1-VL2-L2-VH2-L3-VH1-L4-CH1-L5-CL-L6-Fc;
VL1-L1-VH2-L2-VL2-L3-VH1-L4-CH1-L5-CL-L6-Fc;
VH1-L7-VH2-L8-VL2-L9-VL1-L10-CH1-L11-CL-L12-Fc;
VH1-L7-VL2-L8-VH2-L9-VL1-L10-CH1-L11-CL-L12-Fc;
VL1-L13-VL2-L14-VH2-L15-VH1-L16-CL-L17-CH1-L18-Fc;
VL1-L13-VH2-L14-VL2-L15-VH1-L16-CL-L17-CH1-L18-Fc;
VH1-L19-VH2-L20-VL2-L21-VL1-L22-CL-L23-CH1-L24-Fc; or
VH1-L19-VL2-L20-VH2-L21-VL1-L22-CL-L23-CH1-L24-Fc;
wherein the second polypeptide has a structure represented by:
Fc;
VL3-L25-VL4-L26-VH4-L27-VH3-L28-CH1-L29-CL-L30-Fc;
VL3-L25-VH4-L26-VL4-L27-VH3-L28-CH1-L29-CL-L30-Fc;
VH3-L31-VH4-L32-VL4-L33-VL3-L34-CH1-L35-CL-L36-Fc;
VH3-L31-VL4-L32-VH4-L33-VL3-L34-CH1-L35-CL-L36-Fc;
VL3-L37-VL4-L38-VH4-L39-VH3-L40-CL-L41-CH1-L42-Fc;
VL3-L37-VH4-L38-VL4-L39-VH3-L40-CL-L41-CH1-L42-Fc;
VH3-L43-VH4-L44-VL4-L45-VL3-L46-CL-L47-CH1-L48-Fc; or
VH3-L43-VL4-L44-VH4-L45-VL3-L46-CL-L47-CH1-L48-Fc;
wherein:
VL1 is a first immunoglobulin light chain variable region that specifically binds to a SARS-CoV-2 protein;
VL2 is a second immunoglobulin light chain variable region that specifically binds to a SARS-CoV-2 protein;
VL3 is a third immunoglobulin light chain variable region that specifically binds to a SARS-CoV-2 protein;
VL4 is a fourth immunoglobulin light chain variable region that specifically binds to a SARS-CoV-2 protein;
VH1 is a first immunoglobulin heavy chain variable region that specifically binds to a SARS-CoV-2 protein;
VH2 is a second immunoglobulin heavy chain variable region that specifically binds to a SARS-CoV-2 protein;
VH3 is a third immunoglobulin heavy chain variable region that specifically binds to a SARS-CoV-2 protein;
VH4 is a fourth immunoglobulin heavy chain variable region that specifically binds to a SARS-CoV-2 protein;
CH1 is an immunoglobulin heavy chain constant region 1;
CL is an immunoglobulin light chain constant region;
Fc is a region comprising an immunoglobulin heavy chain constant region 2 (CH2), an immunoglobulin heavy chain constant region 3 (CH3), and optionally, an immunoglobulin hinge; and
L1-L48 are amino acid linkers.

16. An antigen binding polypeptide complex according to claim 15 comprising a first polypeptide and a second polypeptide;
wherein the first polypeptide has a structure represented by:
VL1-L1-VL2-L2-VH2-L3-VH1-L4-CH1-L5-CL-L6-Fc;
VH1-L7-VH2-L8-VL2-L9-VL1-L10-CH1-L11-CL-L12-Fc;
VL1-L13-VL2-L14-VH2-L15-VH1-L16-CL-L17-CH1-L18-Fc; or
VH1-L19-VH2-L20-VL2-L21-VL1-L22-CL-L23-CH1-L24-Fc;
wherein the second polypeptide has a structure represented by:
Fc;
VL3-L25-VL4-L26-VH4-L27-VH3-L28-CH1-L29-CL-L30-Fc;
VH3-L31-VH4-L32-VL4-L33-VL3-L34-CH1-L35-CL-L36-Fc;
VL3-L37-VL4-L38-VH4-L39-VH3-L40-CL-L41-CH1-L42-Fc; or
VH3-L43-VH4-L44-VL4-L45-VL3-L46-CL-L47-CH1-L48-Fc;
wherein:
VL1 is a first immunoglobulin light chain variable region that specifically binds to a SARS-CoV-2 protein;
VL2 is a second immunoglobulin light chain variable region that specifically binds to a SARS-CoV-2 protein;
VL3 is a third immunoglobulin light chain variable region that specifically binds to a SARS-CoV-2 protein;
VL4 is a fourth immunoglobulin light chain variable region that specifically binds to a SARS-CoV-2 protein;
VH1 is a first immunoglobulin heavy chain variable region that specifically binds to a SARS-CoV-2 protein;
VH2 is a second immunoglobulin heavy chain variable region that specifically binds to a SARS-CoV-2 protein;
VH3 is a third immunoglobulin heavy chain variable region that specifically binds to a SARS-CoV-2 protein;
VH4 is a fourth immunoglobulin heavy chain variable region that specifically binds to a SARS-CoV-2 protein;
CH1 is an immunoglobulin heavy chain constant region 1;
CL is an immunoglobulin light chain constant region;
Fc is a region comprising an immunoglobulin heavy chain constant region 2 (CH2), an immunoglobulin heavy chain constant region 3 (CH3), and optionally, an immunoglobulin hinge; and
L1-L48 are amino acid linkers.

17. An antigen binding polypeptide or antigen binding polypeptide complex comprising a polypeptide having a structure represented by:
VL1-L1-VL2-L2-VH2-L3-VH1-L4-Fc-L5-Fc;
VL1-L1-VH2-L2-VL2-L3-VH1-L4-Fc-L5-Fc;
VH1-L6-VH2-L7-VL2-L8-VL1-L9-Fc-L10-Fc; or
VH1-L6-VL2-L7-VH2-L8-VL1-L9-Fc-L10-Fc;
wherein:
VL1 is a first immunoglobulin light chain variable region that specifically binds to a SARS-CoV-2 protein;
VL2 is a second immunoglobulin light chain variable region that specifically binds a SARS-CoV-2 protein;
VH1 is a first immunoglobulin heavy chain variable region that specifically binds to a SARS-CoV-2 protein;
VH2 is a second immunoglobulin heavy chain variable region that specifically binds to a SARS-CoV-2 protein;
Fc is a region comprising an immunoglobulin heavy chain constant region 2 (CH2), an immunoglobulin heavy chain constant region 3 (CH3), and optionally, an immunoglobulin hinge; and
L1-L10 are amino acid linkers.

18. An antigen binding polypeptide or antigen binding polypeptide complex according to claim 17 comprising a polypeptide having a structure represented by:
VL1-L1-VL2-L2-VH2-L3-VH1-L4-Fc-L5-Fc; or
VH1-L6-VH2-L7-VL2-L8-VL1-L9-Fc-L10-Fc;
wherein:
VL1 is a first immunoglobulin light chain variable region that specifically binds to a SARS-CoV-2 protein;
VL2 is a second immunoglobulin light chain variable region that specifically binds a SARS-CoV-2 protein;
VH1 is a first immunoglobulin heavy chain variable region that specifically binds to a SARS-CoV-2 protein;
VH2 is a second immunoglobulin heavy chain variable region that specifically binds to a SARS-CoV-2 protein;
Fc is a region comprising an immunoglobulin heavy chain constant region 2 (CH2), an immunoglobulin heavy chain constant region 3 (CH3), and optionally, an immunoglobulin hinge; and
L1-L10 are amino acid linkers.

19-27. (canceled)

28. The antigen binding polypeptide complex of claim 7, wherein linkers L1-L16 each independently have a length of from 0 amino acids to about 50 amino acids.

29. The antigen binding polypeptide complex of claim 7, wherein linkers L1-L16 not having a length of 0 amino acids each independently comprise an amino acid sequence having at least 80%, at least 85%, at least 90%, or at least 95% identity to any one of SEQ ID NOs:1-34, wherein SEQ ID NO:1 has the amino acid sequence of G, SEQ ID NO:2 has the amino acid sequence of A, SEQ ID NO:3 has the amino acid sequence of GSS and SEQ ID NO:4 has the amino acid sequence of ASG.

30-31. (canceled)

32. The antigen binding polypeptide complex of claim 7, wherein the Fc region comprises at least one knob-into-hole modification or Fc effector function knockout mutation.

33. The antigen binding polypeptide complex of claim 32, wherein the antigen binding polypeptide complex is an IgG1 or IgG4 antibody and the knob-into-hole modification comprises:
(i) knob substitutions of S354C and T366W and hole substitutions of Y349C, T366S, L368A and Y407V;
(ii) hole substitutions of M428L and N434S or N434A;
(iii) hole substitutions of M252Y, S254T and T256E; or
(iv) a combination thereof;
based on the EU numbering scheme.

34. The antigen binding polypeptide complex of claim 32, wherein the antigen binding polypeptide complex is an IgG1 or IgG4 antibody and the Fc effector function knockout mutation is L234A, L235A, P239A or a combination thereof, based on the EU numbering scheme.

35-38. (canceled)

39. The antigen binding polypeptide complex of claim 7 that specifically binds to a SARS-CoV-2 protein with an equilibrium dissociation constant (K_{D}) of from about 10 μM to about 1 μM.

40. The antigen binding polypeptide complex of claim 7, wherein the antigen binding polypeptide complex is bispecific, trispecific or tetraspecific and has greater neutralization potency against SARS-CoV-2 virus than a monospecific antigen binding polypeptide complex that specifically binds to one of the same antigens as the bispecific, trispecific or tetraspecific antigen binding polypeptide complex.

41. The antigen binding polypeptide complex of claim 7, wherein the antigen binding polypeptide complex is bispecific, trispecific or tetraspecific and has greater neutralization potency against SARS-CoV-2 virus than a mixture of monospecific antigen binding polypeptide complexes that specifically bind to the same antigens as the bispecific, trispecific or tetraspecific antigen binding polypeptide complex.

42. The antigen binding polypeptide complex of claim 41, wherein the SARS-CoV-2 virus is the original Wuhan strain (WA1), D614G spike protein mutant (D614G), Alpha variant (B.1.1.7), Beta variant (B.1.351), Gamma variant (P.1), Delta variant, Epsilon variant (B.1.427), or Omicron variant (B.1.1.529), or a combination thereof.

43. An antibody or antigen binding fragment thereof comprising the antigen binding polypeptide complex of claim 7.

44. The antibody or antigen binding fragment thereof of claim 43, wherein the antibody is IgG, IgM, IgE, IgA or IgD.

45. The antibody or antigen binding fragment thereof of claim 44, wherein the IgG is IgG1, IgG2, IgG3 or IgG4.

46. The antibody or antigen binding fragment thereof of claim 43, wherein the antigen binding fragment is a Fab, scFab, Fab′, F(ab′)₂, Fv or scFv.

47. The antibody or antigen binding fragment thereof of claim 43, wherein the antibody is human or humanized.

48. The antibody or antigen binding fragment thereof of claim 43, wherein the antibody is a monoclonal antibody, grafted antibody, or chimeric antibody.

49. An anti-SARS-CoV-2 multivalent antibody that exhibits improved prevention of immune escape compared to (i) a monovalent anti-SARS-CoV-2 antibody that binds to one of the same antigens as the anti-SARS-CoV-2 multivalent antibody, and/or (ii) a combination of monovalent anti-SARS-CoV-2 antibodies that binds to the same antigens as the anti-SARS-CoV-2 multivalent antibody.

50-51. (canceled)

52. A pharmaceutical composition comprising the antigen binding polypeptide complex of claim 7 and a pharmaceutically acceptable carrier.

53-65. (canceled)

66. A kit comprising the antigen binding polypeptide complex of claim 7.

67-72. (canceled)

73. A method of preventing or treating a SARS-CoV-2 viral infection in a subject in need thereof, comprising administering to the subject a therapeutically effective amount of the antigen binding polypeptide complex of claim 7.

74. A method of preventing or treating coronavirus disease 2019 (COVID-19) in a subject in need thereof, comprising administering to the subject a therapeutically effective amount of the antigen binding polypeptide complex of claim 7.

75. A method of diagnosing a subject as being infected with a SARS-CoV-2 virus or suspected of being infected with a SARS-CoV-2 virus, comprising (i) contacting a sample obtained from the subject with the antigen binding polypeptide complex of claim 7; (ii) detecting the presence or absence of a virus complex which contains the polypeptide complex and a SARS-CoV-2 virus, virion or fragment thereof; and (iii) diagnosing the subject as being infected with a SARS-CoV-2 virus or suspected of being infected with a SARS-CoV-2 virus when the presence of the virus complex is detected.

76. A method of diagnosing a subject as not being infected with a SARS-CoV-2 virus or not suspected of being infected with a SARS-CoV-2 virus, comprising (i) contacting a sample obtained from the subject with the antigen binding polypeptide complex of claim 7; (ii) detecting the presence or absence of a virus complex which contains the polypeptide complex and a SARS-CoV-2 virus, virion or fragment thereof; and (iii) diagnosing the subject as not being infected with a SARS-CoV-2 virus or not suspected of being infected with a SARS-CoV-2 virus when the presence of the virus complex is not detected.

77-83. (canceled)

84. A method of preventing immune escape of a SARS-CoV-2 virus in a subject infected with the SARS-CoV-2 virus, comprising administering to the subject an effective amount of an anti-SARS-CoV-2 multivalent antibody that exhibits improved prevention of immune escape compared to (i) a monovalent anti-SARS-CoV-2 antibody that binds to one of the same antigens as the anti-SARS-CoV-2 multivalent antibody, and/or (ii) a combination of monovalent anti-SARS-CoV-2 antibodies that binds to the same antigens as the anti-SARS-CoV-2 multivalent antibody.

85. A method of increasing neutralization potency against a SARS-CoV-2 virus in a subject infected with the SARS-CoV-2 virus, comprising administering to the subject an effective amount of an anti-SARS-CoV-2 multivalent antibody that exhibits increased neutralization potency compared to (i) a monovalent anti-SARS-CoV-2 antibody that binds to one of the same antigens as the anti-SARS-CoV-2 multivalent antibody and/or (ii) a combination of monovalent anti-SARS-CoV-2 antibodies that binds to the same antigens as the anti-SARS-CoV-2 multivalent antibody.

86-128. (canceled)

129. A multispecific antibody selected from:
(a) an antigen binding polypeptide having a structure represented by:
VL1-L1-VH1 or VH1-L2-VL1;
wherein:
VL1 is a first immunoglobulin light chain variable region that specifically binds to a severe acute respiratory syndrome coronavirus 2 (SARS-CoV-2) protein;
VH1 is a first immunoglobulin heavy chain variable region that specifically binds to a SARS-CoV-2 protein; and
L1 and L2 are amino acid linkers; or
an antigen binding polypeptide having a structure represented by:
VL1-L1-VL2-L2-VH2-L3-VH1;
VL1-L1-VH2-L2-VL2-L3-VH1;
VH1-L4-VH2-L5-VL2-L6-VL1; or
VH1-L4-VL2-L5-VH2-L6-VL1;
wherein:
VL1 is a first immunoglobulin light chain variable region that specifically binds to a SARS-CoV-2 protein;
VL2 is a second immunoglobulin light chain variable region that specifically binds to a SARS-CoV-2 protein;
VH1 is a first immunoglobulin heavy chain variable region that specifically binds to a SARS-CoV-2 protein;
VH2 is a second immunoglobulin heavy chain variable region that specifically binds to a SARS-CoV-2 protein; and
L1-L6 are amino acid linkers; and
wherein (a) is an antigen binding polypeptide in an antigen binding polypeptide complex having no more than three polypeptide chains; or
(b) an antigen binding polypeptide having a structure represented by:
VL1-L1-VH1 or VH1-L2-VL1;
wherein:
VL1 is a first immunoglobulin light chain variable region that specifically binds to a SARS-CoV-2 protein;
VH1 is a first immunoglobulin heavy chain variable region that specifically binds to a SARS-CoV-2 protein; and
L1 and L2 are amino acid linkers; or
an antigen binding polypeptide having a structure represented by:
VL1-L1-VL2-L2-VH2-L3-VH1;
VL1-L1-VH2-L2-VL2-L3-VH1;
VH1-L4-VH2-L5-VL2-L6-VL1; or
VH1-L4-VL2-L5-VH2-L6-VL1;
wherein:
VL1 is a first immunoglobulin light chain variable region that specifically binds to a SARS-CoV-2 protein;
VL2 is a second immunoglobulin light chain variable region that specifically binds to a SARS-CoV-2 protein;
VH1 is a first immunoglobulin heavy chain variable region that specifically binds to a SARS-CoV-2 protein;
VH2 is a second immunoglobulin heavy chain variable region that specifically binds to a SARS-CoV-2 protein; and
L1-L6 are amino acid linkers;
wherein (b) is an antigen binding polypeptide in an antigen binding polypeptide complex having no more than three polypeptide chains; and
wherein the antigen binding polypeptide further comprises one or more immunoglobulin heavy chain constant region 1 (CH1) and/or one or more immunoglobulin light chain constant region (CL) between any one of the variable regions and/or amino acid linkers.

130-132. (canceled)

The application's sequence listing, which the Patent Office published only in electronic form, follows.

SEQUENCE LISTING (788 sequences)

SEQ ID NO: 1-4 - skipped (4 entries)

SEQ ID NO: 5 - protein, 4 aa, synthetic construct
  REGION 1..4: note = Linker
SGSG

SEQ ID NO: 6 - protein, 5 aa, synthetic construct
  REGION 1..5: note = Linker
GGSSG

SEQ ID NO: 7 - protein, 5 aa, synthetic construct
  REGION 1..5: note = Linker
GGSGS

SEQ ID NO: 8 - protein, 5 aa, synthetic construct
  REGION 1..5: note = Linker
GSSGS

SEQ ID NO: 9 - protein, 5 aa, synthetic construct
  REGION 1..5: note = Linker
GTVAA

SEQ ID NO: 10 - protein, 5 aa, synthetic construct
  REGION 1..5: note = Linker
ASGGS

SEQ ID NO: 11 - protein, 5 aa, synthetic construct
  REGION 1..5: note = Linker
ASTGG

SEQ ID NO: 12 - protein, 6 aa, synthetic construct
  REGION 1..6: note = Linker
ASGGSG

SEQ ID NO: 13 - protein, 7 aa, synthetic construct
  REGION 1..7: note = Linker
GGSGSSG

SEQ ID NO: 14 - protein, 10 aa, synthetic construct
  REGION 1..10: note = Linker
GGSGGSSGSS

SEQ ID NO: 15 - protein, 10 aa, synthetic construct
  REGION 1..10: note = Linker
SGGSGSSGGS

SEQ ID NO: 16 - protein, 7 aa, synthetic construct
  REGION 1..7: note = Linker
SGSGGSG

SEQ ID NO: 17 - protein, 9 aa, synthetic construct
  REGION 1..9: note = Linker
SGSGGSSGG

SEQ ID NO: 18 - protein, 11 aa, synthetic construct
  REGION 1..11: note = Linker
SGSGGSSGGSG

SEQ ID NO: 19 - protein, 13 aa, synthetic construct
  REGION 1..13: note = Linker
GSGSGGSSGGSSG

SEQ ID NO: 20 - protein, 10 aa, synthetic construct
  REGION 1..10: note = Linker
GGSGSGGGSG

SEQ ID NO: 21 - protein, 11 aa, synthetic construct
  REGION 1..11: note = Linker
GGSGSGGGSGG

SEQ ID NO: 22 - protein, 15 aa, synthetic construct
  REGION 1..15: note = Linker
GGSSGSGSGGSGSSG

SEQ ID NO: 23 - protein, 14 aa, synthetic construct
  REGION 1..14: note = Linker
GGSGGSGGGSSGSG

SEQ ID NO: 24 - protein, 17 aa, synthetic construct
  REGION 1..17: note = Linker
GGSGGSGSGGGSASGSG

SEQ ID NO: 25 - protein, 18 aa, synthetic construct
  REGION 1..18: note = Linker
GGSGGSGSGGGGSASGSG

SEQ ID NO: 26 - protein, 20 aa, synthetic construct
  REGION 1..20: note = Linker
GGGSSGGGGSGGSGSGGSGS

SEQ ID NO: 27 - protein, 20 aa, synthetic construct
  REGION 1..20: note = Linker
GGGGSGGSGSGGGGSASGSG

SEQ ID NO: 28 - protein, 20 aa, synthetic construct
  REGION 1..20: note = Linker
GGGSSGGSGSGGSGSGGSGS

SEQ ID NO: 29 - protein, 22 aa, synthetic construct
  REGION 1..22: note = Linker
SGGSSGGSGSGGSGSGGSGSSG

SEQ ID NO: 30 - protein, 22 aa, synthetic construct
  REGION 1..22: note = Linker
GSGSSGGGGSGGSGSGGSGSSG

SEQ ID NO: 31 - protein, 40 aa, synthetic construct
  REGION 1..40: note = Linker
GGGGSGSGGSGGGSSGGGGSGGGGSGGGGSGGGGSGGGGS

SEQ ID NO: 32 - protein, 40 aa, synthetic construct
  REGION 1..40: note = Linker
GGGGSGGGGSGGGGSGGGGSGGGGSGGGGSGGGGSGGGGS

SEQ ID NO: 33 - protein, 43 aa, synthetic construct
  REGION 1..43: note = Linker
GGGGSGSGGSGGGSSGGGGSGGGGSGGGGSGGGGSGGGGSSSS

SEQ ID NO: 34 - protein, 45 aa, synthetic construct
  REGION 1..45: note = Linker
GGGGSGSGGSGGGSSGGGGSGGGGSGGGGSGGGGSGGGGSSSSGS

SEQ ID NO: 35 - protein, 107 aa, synthetic construct [sequence omitted]

SEQ ID NO: 36 - protein, 101 aa, synthetic construct
  REGION 1..101: note = CH1
ASTKGPSVFPLAPSSKSTSGGTAALGCLVKDYFPEPVTVSWNSGALTSGVHTFPAVLQSSGSLSSVVTVPSSSLGTQTYICNVNHKPSNTKVDKKVEPKSC

SEQ ID NO: 37 - protein, 222 aa, synthetic construct
  REGION 1..222: note = Fc
DKTHTCPPCPAPELLGGPSVFLFPPKPKDTLMISRTPEVTCVVVDVSHEDPEVKFNWYVDGVEVHNAKTKPREEQYNSYVVSVLTVLHQDWLNGKEYKCKVSNKALPAPIEKTISKAKGQPREPQVYTLPPSRDELTKNQVSLTCLVKGFYPSDIAVEWESNGQPENNYKTTPPVLDSDGSFFKKLTVDKSRWQQGNVFSCSVLHEALHSHYTQKSLSLSPG

SEQ ID NO: 38 - protein, 108 aa, synthetic construct
  REGION 1..108: note = VL B1-182
EIVLTQSPGTLSLSPGERATLSCRASQSVSSSYLAWYQQKPGQAPRLLIYGASSRATGFPDRFSGSGSGTDFTLTISRLEPEDFAVYYCQQYGNSPWTFGQGTKVEIR

SEQ ID NO: 39 - protein, 7 aa, synthetic construct
  REGION 1..7: note = LCDR1 B1-182
QSVSSSY

SEQ ID NO: 40 - skipped

SEQ ID NO: 41 - protein, 10 aa, synthetic construct
  REGION 1..10: note = LCDR3 B1-182
QQYGNSPWTF

SEQ ID NO: 42 - protein, 121 aa, synthetic construct
  REGION 1..121: note = VH B1-182
QMQLVQSGPEVKKPGTSVKVSCKASGFTFTSSAVQWVRQRQRLEWIGWIVVGSGNTNYAQKFQERVTITRDMSTSTAYMELSSLRSEDTAVYYCAAPYCSGGSCFDGFDIWGQGTMVTVSS

SEQ ID NO: 43 - protein, 8 aa, synthetic construct
  REGION 1..8: note = HCDR1 B1-182
GFTFTSSA

SEQ ID NO: 44 - protein, 8 aa, synthetic construct
  REGION 1..8: note = HCDR2 B1-182
IVVGSGNT

SEQ ID NO: 45 - protein, 17 aa, synthetic construct
  REGION 1..17: note = HCDR3 B1-182
AAPYCSGGSCFDGFDIW

SEQ ID NO: 46 - protein, 108 aa, synthetic construct; identical to SEQ ID NO: 38
  REGION 1..108: note = VL A23-58H/B1-182L

SEQ ID NO: 47 - protein, 7 aa, synthetic construct
  REGION 1..7: note = LCDR1 A23-58H/B1-182L
QSVSSSY

SEQ ID NO: 48 - skipped

SEQ ID NO: 49 - protein, 10 aa, synthetic construct
  REGION 1..10: note = LCDR3 A23-58H/B1-182L
QQYGNSPWTF

SEQ ID NO: 50 - protein, 127 aa, synthetic construct
  REGION 1..127: note = VH A23-58H/B1-182L
SASGSGQMQLVQSGPEVKKPGTSVKVSCKASGFTFTSSAVQWVRQRQRLEWIGWIVVGSGNTNYAQKFQERVTITRDMSTSTAYMELSSLRSEDTAVYYCAAPNCSNVVCYDGFDIWGQGTMVTVSS

SEQ ID NO: 51 - protein, 8 aa, synthetic construct
  REGION 1..8: note = HCDR1 A23-58H/B1-182L
GFTFTSSA

SEQ ID NO: 52 - protein, 8 aa, synthetic construct
  REGION 1..8: note = HCDR2 A23-58H/B1-182L
IVVGSGNT

SEQ ID NO: 53 - protein, 17 aa, synthetic construct
  REGION 1..17: note = HCDR3 A23-58H/B1-182L
AAPNCSNVVCYDGFDIW

SEQ ID NO: 54 - protein, 110 aa, synthetic construct
  REGION 1..110: note = VL A19-46
QTVVTQEPSFSVSPGGTVTLTCGLSSGSVSTAYFPSWYQQTPGQAPRTLIYGTNTRSSGVPDRFSGSILGNKAALTITGAQADDESDYYCVLYMGRGIVVFGGGTKLTVL

SEQ ID NO: 55 - protein, 9 aa, synthetic construct
  REGION 1..9: note = LCDR1 A19-46
SGSVSTAYF

SEQ ID NO: 56 - skipped

SEQ ID NO: 57 - protein, 10 aa, synthetic construct
  REGION 1..10: note = LCDR3 A19-46
VLYMGRGIVV

SEQ ID NO: 58 - protein, 124 aa, synthetic construct
  REGION 1..124: note = VH A19-46
QVQLVESGGGVVQPGRSLRLSCAASGFTLSSYGMHWVRQAPGKGLEWVAVISYDGSNKYYVDSVKGRFTISRDNSKNTLYLQMNSLRAEDTAVYYCRWAYWELLPDYYYGMDVWGQGTTVTVSS

SEQ ID NO: 59 - protein, 8 aa, synthetic construct
  REGION 1..8: note = HCDR1 A19-46
GFTLSSYG

SEQ ID NO: 60 - protein, 8 aa, synthetic construct
  REGION 1..8: note = HCDR2 A19-46
ISYDGSNK

SEQ ID NO: 61 - protein, 17 aa, synthetic construct
  REGION 1..17: note = HCDR3 A19-46
RWAYWELLPDYYYGMDV

SEQ ID NO: 62 - protein, 107 aa, synthetic construct
  REGION 1..107: note = VL A19-61
DIQMTQSPSSVSASVGDRVIITCRASQGISSWLAWYQQKPGKAPKVLIYDASSLQSGVPSRFSGSGYGTDFTLTISSLQPEDSATYYCQQAKSFPITFGQGTRLEIK

SEQ ID NO: 63 - protein, 6 aa, synthetic construct
  REGION 1..6: note = LCDR1 A19-61
QGISSW

SEQ ID NO: 64 - skipped

SEQ ID NO: 65 - protein, 10 aa, synthetic construct
  REGION 1..10: note = LCDR3 A19-61
QQAKSFPITF

SEQ ID NO: 66 - protein, 127 aa, synthetic construct
  REGION 1..127: note = VH A19-61
QVQLVESGGGVVQPGRSLRLSCAASGFTFSSYAFHWVRQAPGKGLEWVAVISYDGSNQYYADSVKGRFTISRDNSKNTLYLQMNSLRADDTAVYYCARDLAIAVAGTWHYYNGMDVWGQGTTVTVSS

SEQ ID NO: 67 - protein, 8 aa, synthetic construct
  REGION 1..8: note = HCDR1 A19-61
GFTFSSYA

SEQ ID NO: 68 - protein, 8 aa, synthetic construct
  REGION 1..8: note = HCDR2 A19-61
ISYDGSNQ

SEQ ID NO: 69 - protein, 22 aa, synthetic construct
  REGION 1..22: note = HCDR3 A19-61
CARDLAIAVAGTWHYYNGMDVW

SEQ ID NO: 70 - protein, 108 aa, synthetic construct
  REGION 1..108: note = VL A23-58
EIVLTQSPGTLSLSPGERATLSCRASQSVSSSYLAWYQQKPGQAPRLLIYSASSRATGIPDRFSGSGSGTDFTLTISRLEPEDFAVYFCQQYGTSPWTFGQGTKVEIK

SEQ ID NO: 71 - protein, 7 aa, synthetic construct
  REGION 1..7: note = LCDR1 A23-58
QSVSSSY

SEQ ID NO: 72 - skipped

SEQ ID NO: 73 - protein, 10 aa, synthetic construct
  REGION 1..10: note = LCDR3 A23-58
QQYGTSPWTF

SEQ ID NO: 74 - protein, 121 aa, synthetic construct
  REGION 1..121: note = VH A23-58
QMQLVQSGPEVKKPGTSVKVSCKASGFTFTSSAVQWVRQRQRLEWIGWIVVGSGNTNYAQKFQERVTITRDMSTSTAYMELSSLRSEDTAVYYCAAPNCSNVVCYDGFDIWGQGTMVTVSS

SEQ ID NO: 75 - protein, 8 aa, synthetic construct
  REGION 1..8: note = HCDR1 A23-58
GFTFTSSA

SEQ ID NO: 76 - protein, 8 aa, synthetic construct
  REGION 1..8: note = HCDR2 A23-58
IVVGSGNT

SEQ ID NO: 77 - protein, 17 aa, synthetic construct
  REGION 1..17: note = HCDR3 A23-58
AAPNCSNVVCYDGFDIW

SEQ ID NO: 78 - protein, 716 aa, synthetic construct
  REGION 1..716: note = MX241 B1-182 - peptide
EIVLTQSPGTLSLSPGERATLSCRASQSVSSSYLAWYQQKPGQAPRLLIYGASSRATGFPDRFSGSGSGTDFTLTISRLEPEDFAVYYCQQYGNSPWTFGQGTKVEIRGGSSGEIVLTQSPGTLSLSPGERATLSCRASQSVSSSYLAWYQQKPGQAPRLLIYGASSRATGFPDRFSGSGSGTDFTLTISRLEPEDFAVYYCQQYGNSPWTFGQGTKVEIRGGGGSGGSGSGGGGSASGSGQMQLVQSGPEVKKPGTSVKVSCKASGFTFTSSAVQWVRQRQRLEWIGWIVVGSGNTNYAQKFQERVTITRDMSTSTAYMELSSLRSEDTAVYYCAAPYCSGGSCFDGFDIWGQGTMVTVSSGGSSGQMQLVQSGPEVKKPGTSVKVSCKASGFTFTSSAVQWVRQRQRLEWIGWIVVGSGNTNYAQKFQERVTITRDMSTSTAYMELSSLRSEDTAVYYCAAPYCSGGSCFDGFDIWGQGTMVTVSSASGGSGDKTHTCPPCPAPELLGGPSVFLFPPKPKDTLMISRTPEVTCVVVDVSHEDPEVKFNWYVDGVEVHNAKTKPREEQYNSYVVSVLTVLHQDWLNGKEYKCKVSNKALPAPIEKTISKAKGQPREPQVYTLPPSRDELTKNQVSLTCLVKGFYPSDIAVEWESNGQPENNYKTTPPVLDSDGSFFKKLTVDKSRWQQGNVFSCSVLHEALHSHYTQKSLSLSPG

SEQ ID NO: 79 - protein, 938 aa, synthetic construct
  REGION 1..938: note = MX365 B1-182 CL-CH1 - peptide
EIVLTQSPGTLSLSPGERATLSCRASQSVSSSYLAWYQQKPGQAPRLLIYGASSRATGFPDRFSGSGSGTDFTLTISRLEPEDFAVYYCQQYGNSPWTFGQGTKVEIRGGSSGEIVLTQSPGTLSLSPGERATLSCRASQSVSSSYLAWYQQKPGQAPRLLIYGASSRATGFPDRFSGSGSGTDFTLTISRLEPEDFAVYYCQQYGNSPWTFGQGTKVEIRGGGGSGGSGSGGGGSASGSGQMQLVQSGPEVKKPGTSVKVSCKASGFTFTSSAVQWVRQRQRLEWIGWIVVGSGNTNYAQKFQERVTITRDMSTSTAYMELSSLRSEDTAVYYCAAPYCSGGSCFDGFDIWGQGTMVTVSSGGSSGQMQLVQSGPEVKKPGTSVKVSCKASGFTFTSSAVQWVRQRQRLEWIGWIVVGSGNTNYAQKFQERVTITRDMSTSTAYMELSSLRSEDTAVYYCAAPYCSGGSCFDGFDIWGQGTMVTVSSRTVAAPSVFIFPPSDEQLKSGTASVVCLLNNFYPREAKVQWKVDNALQSGNSQESVTEQDSKDSTYSLSSTLTLSKADYEKHKVYACEVTHQGLSSPVTKSFNRGECGGGGSGGSGSGGGGSASGSGASTKGPSVFPLAPSSKSTSGGTAALGCLVKDYFPEPVTVSWNSGALTSGVHTFPAVLQSSGSLSSVVTVPSSSLGTQTYICNVNHKPSNTKVDKKVEPKSCDKTHTCPPCPAPELLGGPSVFLFPPKPKDTLMISRTPEVTCVVVDVSHEDPEVKFNWYVDGVEVHNAKTKPREEQYNSYVVSVLTVLHQDWLNGKEYKCKVSNKALPAPIEKTISKAKGQPREPQVYTLPPSRDELTKNQVSLTCLVKGFYPSDIAVEWESNGQPENNYKTTPPVLDSDGSFFKKLTVDKSRWQQGNVFSCSVLHEALHSHYTQKSLSLSPG

SEQ ID NO: 80 - protein, 716 aa, synthetic construct
  REGION 1..716: note = MX409 A23-58H/B1-182L - peptide
EIVLTQSPGTLSLSPGERATLSCRASQSVSSSYLAWYQQKPGQAPRLLIYGASSRATGFPDRFSGSGSGTDFTLTISRLEPEDFAVYYCQQYGNSPWTFGQGTKVEIRGGSSGEIVLTQSPGTLSLSPGERATLSCRASQSVSSSYLAWYQQKPGQAPRLLIYGASSRATGFPDRFSGSGSGTDFTLTISRLEPEDFAVYYCQQYGNSPWTFGQGTKVEIRGGGGSGGSGSGGGGSASGSGQMQLVQSGPEVKKPGTSVKVSCKASGFTFTSSAVQWVRQRQRLEWIGWIVVGSGNTNYAQKFQERVTITRDMSTSTAYMELSSLRSEDTAVYYCAAPNCSNVVCYDGFDIWGQGTMVTVSSGGSSGQMQLVQSGPEVKKPGTSVKVSCKASGFTFTSSAVQWVRQRQRLEWIGWIVVGSGNTNYAQKFQERVTITRDMSTSTAYMELSSLRSEDTAVYYCAAPNCSNVVCYDGFDIWGQGTMVTVSSASGGSGDKTHTCPPCPAPELLGGPSVFLFPPKPKDTLMISRTPEVTCVVVDVSHEDPEVKFNWYVDGVEVHNAKTKPREEQYNSYVVSVLTVLHQDWLNGKEYKCKVSNKALPAPIEKTISKAKGQPREPQVYTLPPSRDELTKNQVSLTCLVKGFYPSDIAVEWESNGQPENNYKTTPPVLDSDGSFFKKLTVDKSRWQQGNVFSCSVLHEALHSHYTQKSLSLSPG

SEQ ID NO: 81 - protein, 938 aa, synthetic construct
  REGION 1..938: note = MX466 - A23-58H/B1-182L CL-CH1 - peptide
EIVLTQSPGTLSLSPGERATLSCRASQSVSSSYLAWYQQKPGQAPRLLIYGASSRATGFPDRFSGSGSGTDFTLTISRLEPEDFAVYYCQQYGNSPWTFGQGTKVEIRGGSSGEIVLTQSPGTLSLSPGERATLSCRASQSVSSSYLAWYQQKPGQAPRLLIYGASSRATGFPDRFSGSGSGTDFTLTISRLEPEDFAVYYCQQYGNSPWTFGQGTKVEIRGGGGSGGSGSGGGGSASGSGQMQLVQSGPEVKKPGTSVKVSCKASGFTFTSSAVQWVRQRQRLEWIGWIVVGSGNTNYAQKFQERVTITRDMSTSTAYMELSSLRSEDTAVYYCAAPNCSNVVCYDGFDIWGQGTMVTVSSGGSSGQMQLVQSGPEVKKPGTSVKVSCKASGFTFTSSAVQWVRQRQRLEWIGWIVVGSGNTNYAQKFQERVTITRDMSTSTAYMELSSLRSEDTAVYYCAAPNCSNVVCYDGFDIWGQGTMVTVSSRTVAAPSVFIFPPSDEQLKSGTASVVCLLNNFYPREAKVQWKVDNALQSGNSQESVTEQDSKDSTYSLSSTLTLSKADYEKHKVYACEVTHQGLSSPVTKSFNRGECGGGGSGGSGSGGGGSASGSGASTKGPSVFPLAPSSKSTSGGTAALGCLVKDYFPEPVTVSWNSGALTSGVHTFPAVLQSSGSLSSVVTVPSSSLGTQTYICNVNHKPSNTKVDKKVEPKSCDKTHTCPPCPAPELLGGPSVFLFPPKPKDTLMISRTPEVTCVVVDVSHEDPEVKFNWYVDGVEVHNAKTKPREEQYNSYVVSVLTVLHQDWLNGKEYKCKVSNKALPAPIEKTISKAKGQPREPQVYTLPPSRDELTKNQVSLTCLVKGFYPSDIAVEWESNGQPENNYKTTPPVLDSDGSFFKKLTVDKSRWQQGNVFSCSVLHEALHSHYTQKSLSLSPG

SEQ ID NO: 82 - protein, 721 aa, synthetic construct
  REGION 1..721: note = MX179 A19-46   B1-182 - peptide
QTVVTQEPSFSVSPGGTVTLTCGLSSGSVSTAYFPSWYQQTPGQAPRTLIYGTNTRSSGVPDRFSGSILGNKAALTITGAQADDESDYYCVLYMGRGIVVFGGGTKLTVLGGSSGEIVLTQSPGTLSLSPGERATLSCRASQSVSSSYLAWYQQKPGQAPRLLIYGASSRATGFPDRFSGSGSGTDFTLTISRLEPEDFAVYYCQQYGNSPWTFGQGTKVEIRGGGGSGGSGSGGGGSASGSGQMQLVQSGPEVKKPGTSVKVSCKASGFTFTSSAVQWVRQRQRLEWIGWIVVGSGNTNYAQKFQERVTITRDMSTSTAYMELSSLRSEDTAVYYCAAPYCSGGSCFDGFDIWGQGTMVTVSSGGSSGQVQLVESGGGVVQPGRSLRLSCAASGFTLSSYGMHWVRQAPGKGLEWVAVISYDGSNKYYVDSVKGRFTISRDNSKNTLYLQMNSLRAEDTAVYYCRWAYWELLPDYYYGMDVWGQGTTVTVSSASGGSGDKTHTCPPCPAPELLGGPSVFLFPPKPKDTLMISRTPEVTCVVVDVSHEDPEVKFNWYVDGVEVHNAKTKPREEQYNSYVVSVLTVLHQDWLNGKEYKCKVSNKALPAPIEKTISKAKGQPREPQVYTLPPSRDELTKNQVSLTCLVKGFYPSDIAVEWESNGQPENNYKTTPPVLDSDGSFFKKLTVDKSRWQQGNVFSCSVLHEALHSHYTQKSLSLSPG

SEQ ID NO: 83 - protein, 721 aa, synthetic construct
  REGION 1..721: note = MX180 B1-182   A19-46 - peptide
EIVLTQSPGTLSLSPGERATLSCRASQSVSSSYLAWYQQKPGQAPRLLIYGASSRATGFPDRFSGSGSGTDFTLTISRLEPEDFAVYYCQQYGNSPWTFGQGTKVEIRGGSSGQTVVTQEPSFSVSPGGTVTLTCGLSSGSVSTAYFPSWYQQTPGQAPRTLIYGTNTRSSGVPDRFSGSILGNKAALTITGAQADDESDYYCVLYMGRGIVVFGGGTKLTVLGGGGSGGSGSGGGGSASGSGQVQLVESGGGVVQPGRSLRLSCAASGFTLSSYGMHWVRQAPGKGLEWVAVISYDGSNKYYVDSVKGRFTISRDNSKNTLYLQMNSLRAEDTAVYYCRWAYWELLPDYYYGMDVWGQGTTVTVSSGGSSGQMQLVQSGPEVKKPGTSVKVSCKASGFTFTSSAVQWVRQRQRLEWIGWIVVGSGNTNYAQKFQERVTITRDMSTSTAYMELSSLRSEDTAVYYCAAPYCSGGSCFDGFDIWGQGTMVTVSSASGGSGDKTHTCPPCPAPELLGGPSVFLFPPKPKDTLMISRTPEVTCVVVDVSHEDPEVKFNWYVDGVEVHNAKTKPREEQYNSYVVSVLTVLHQDWLNGKEYKCKVSNKALPAPIEKTISKAKGQPREPQVYTLPPSRDELTKNQVSLTCLVKGFYPSDIAVEWESNGQPENNYKTTPPVLDSDGSFFKKLTVDKSRWQQGNVFSCSVLHEALHSHYTQKSLSLSPG

SEQ ID NO: 84 - protein, 721 aa, synthetic construct
  REGION 1..721: note = MX183 A19-61   B1-182 - peptide
DIQMTQSPSSVSASVGDRVIITCRASQGISSWLAWYQQKPGKAPKVLIYDASSLQSGVPSRFSGSGYGTDFTLTISSLQPEDSATYYCQQAKSFPITFGQGTRLEIKGGSSGEIVLTQSPGTLSLSPGERATLSCRASQSVSSSYLAWYQQKPGQAPRLLIYGASSRATGFPDRFSGSGSGTDFTLTISRLEPEDFAVYYCQQYGNSPWTFGQGTKVEIRGGGGSGGSGSGGGGSASGSGQMQLVQSGPEVKKPGTSVKVSCKASGFTFTSSAVQWVRQRQRLEWIGWIVVGSGNTNYAQKFQERVTITRDMSTSTAYMELSSLRSEDTAVYYCAAPYCSGGSCFDGFDIWGQGTMVTVSSGGSSGQVQLVESGGGVVQPGRSLRLSCAASGFTFSSYAFHWVRQAPGKGLEWVAVISYDGSNQYYADSVKGRFTISRDNSKNTLYLQMNSLRADDTAVYYCARDLAIAVAGTWHYYNGMDVWGQGTTVTVSSASGGSGDKTHTCPPCPAPELLGGPSVFLFPPKPKDTLMISRTPEVTCVVVDVSHEDPEVKFNWYVDGVEVHNAKTKPREEQYNSYVVSVLTVLHQDWLNGKEYKCKVSNKALPAPIEKTISKAKGQPREPQVYTLPPSRDELTKNQVSLTCLVKGFYPSDIAVEWESNGQPENNYKTTPPVLDSDGSFFKKLTVDKSRWQQGNVFSCSVLHEALHSHYTQKSLSLSPG

SEQ ID NO: 85 - protein, 721 aa, synthetic construct
  REGION 1..721: note = MX184 B1-182   A19-61 - peptide
EIVLTQSPGTLSLSPGERATLSCRASQSVSSSYLAWYQQKPGQAPRLLIYGASSRATGFPDRFSGSGSGTDFTLTISRLEPEDFAVYYCQQYGNSPWTFGQGTKVEIRGGSSGDIQMTQSPSSVSASVGDRVIITCRASQGISSWLAWYQQKPGKAPKVLIYDASSLQSGVPSRFSGSGYGTDFTLTISSLQPEDSATYYCQQAKSFPITFGQGTRLEIKGGGGSGGSGSGGGGSASGSGQVQLVESGGGVVQPGRSLRLSCAASGFTFSSYAFHWVRQAPGKGLEWVAVISYDGSNQYYADSVKGRFTISRDNSKNTLYLQMNSLRADDTAVYYCARDLAIAVAGTWHYYNGMDVWGQGTTVTVSSGGSSGQMQLVQSGPEVKKPGTSVKVSCKASGFTFTSSAVQWVRQRQRLEWIGWIVVGSGNTNYAQKFQERVTITRDMSTSTAYMELSSLRSEDTAVYYCAAPYCSGGSCFDGFDIWGQGTMVTVSSASGGSGDKTHTCPPCPAPELLGGPSVFLFPPKPKDTLMISRTPEVTCVVVDVSHEDPEVKFNWYVDGVEVHNAKTKPREEQYNSYVVSVLTVLHQDWLNGKEYKCKVSNKALPAPIEKTISKAKGQPREPQVYTLPPSRDELTKNQVSLTCLVKGFYPSDIAVEWESNGQPENNYKTTPPVLDSDGSFFKKLTVDKSRWQQGNVFSCSVLHEALHSHYTQKSLSLSPG

SEQ ID NO: 86 - protein, 721 aa, synthetic construct
  REGION 1..721: note = MX326 A23-58   A19-61 - peptide
EIVLTQSPGTLSLSPGERATLSCRASQSVSSSYLAWYQQKPGQAPRLLIYSASSRATGIPDRFSGSGSGTDFTLTISRLEPEDFAVYFCQQYGTSPWTFGQGTKVEIKGGSSGDIQMTQSPSSVSASVGDRVIITCRASQGISSWLAWYQQKPGKAPKVLIYDASSLQSGVPSRFSGSGYGTDFTLTISSLQPEDSATYYCQQAKSFPITFGQGTRLEIKGGGGSGGSGSGGGGSASGSGQVQLVESGGGVVQPGRSLRLSCAASGFTFSSYAFHWVRQAPGKGLEWVAVISYDGSNQYYADSVKGRFTISRDNSKNTLYLQMNSLRADDTAVYYCARDLAIAVAGTWHYYNGMDVWGQGTTVTVSSGGSSGQMQLVQSGPEVKKPGTSVKVSCKASGFTFTSSAVQWVRQRQRLEWIGWIVVGSGNTNYAQKFQERVTITRDMSTSTAYMELSSLRSEDTAVYYCAAPNCSNVVCYDGFDIWGQGTMVTVSSASGGSGDKTHTCPPCPAPELLGGPSVFLFPPKPKDTLMISRTPEVTCVVVDVSHEDPEVKFNWYVDGVEVHNAKTKPREEQYNSYVVSVLTVLHQDWLNGKEYKCKVSNKALPAPIEKTISKAKGQPREPQVYTLPPSRDELTKNQVSLTCLVKGFYPSDIAVEWESNGQPENNYKTTPPVLDSDGSFFKKLTVDKSRWQQGNVFSCSVLHEALHSHYTQKSLSLSPG

SEQ ID NO: 87 - protein, 721 aa, synthetic construct
  REGION 1..721: note = MX327 A19-61   A23-58 - peptide
DIQMTQSPSSVSASVGDRVIITCRASQGISSWLAWYQQKPGKAPKVLIYDASSLQSGVPSRFSGSGYGTDFTLTISSLQPEDSATYYCQQAKSFPITFGQGTRLEIKGGSSGEIVLTQSPGTLSLSPGERATLSCRASQSVSSSYLAWYQQKPGQAPRLLIYSASSRATGIPDRFSGSGSGTDFTLTISRLEPEDFAVYFCQQYGTSPWTFGQGTKVEIKGGGGSGGSGSGGGGSASGSGQMQLVQSGPEVKKPGTSVKVSCKASGFTFTSSAVQWVRQRQRLEWIGWIVVGSGNTNYAQKFQERVTITRDMSTSTAYMELSSLRSEDTAVYYCAAPNCSNVVCYDGFDIWGQGTMVTVSSGGSSGQVQLVESGGGVVQPGRSLRLSCAASGFTFSSYAFHWVRQAPGKGLEWVAVISYDGSNQYYADSVKGRFTISRDNSKNTLYLQMNSLRADDTAVYYCARDLAIAVAGTWHYYNGMDVWGQGTTVTVSSASGGSGDKTHTCPPCPAPELLGGPSVFLFPPKPKDTLMISRTPEVTCVVVDVSHEDPEVKFNWYVDGVEVHNAKTKPREEQYNSYVVSVLTVLHQDWLNGKEYKCKVSNKALPAPIEKTISKAKGQPREPQVYTLPPSRDELTKNQVSLTCLVKGFYPSDIAVEWESNGQPENNYKTTPPVLDSDGSFFKKLTVDKSRWQQGNVFSCSVLHEALHSHYTQKSLSLSPG

SEQ ID NO: 88 - protein, 943 aa, synthetic construct
  REGION 1..943: note = MX366 A19-61   B1-182 CL-CH1 - peptide
DIQMTQSPSSVSASVGDRVIITCRASQGISSWLAWYQQKPGKAPKVLIYDASSLQSGVPSRFSGSGYGTDFTLTISSLQPEDSATYYCQQAKSFPITFGQGTRLEIKGGSSGEIVLTQSPGTLSLSPGERATLSCRASQSVSSSYLAWYQQKPGQAPRLLIYGASSRATGFPDRFSGSGSGTDFTLTISRLEPEDFAVYYCQQYGNSPWTFGQGTKVEIRGGGGSGGSGSGGGGSASGSGQMQLVQSGPEVKKPGTSVKVSCKASGFTFTSSAVQWVRQRQRLEWIGWIVVGSGNTNYAQKFQERVTITRDMSTSTAYMELSSLRSEDTAVYYCAAPYCSGGSCFDGFDIWGQGTMVTVSSGGSSGQVQLVESGGGVVQPGRSLRLSCAASGFTFSSYAFHWVRQAPGKGLEWVAVISYDGSNQYYADSVKGRFTISRDNSKNTLYLQMNSLRADDTAVYYCARDLAIAVAGTWHYYNGMDVWGQGTTVTVSSRTVAAPSVFIFPPSDEQLKSGTASVVCLLNNFYPREAKVQWKVDNALQSGNSQESVTEQDSKDSTYSLSSTLTLSKADYEKHKVYACEVTHQGLSSPVTKSFNRGECGGGGSGGSGSGGGGSASGSGASTKGPSVFPLAPSSKSTSGGTAALGCLVKDYFPEPVTVSWNSGALTSGVHTFPAVLQSSGSLSSVVTVPSSSLGTQTYICNVNHKPSNTKVDKKVEPKSCDKTHTCPPCPAPELLGGPSVFLFPPKPKDTLMISRTPEVTCVVVDVSHEDPEVKFNWYVDGVEVHNAKTKPREEQYNSYVVSVLTVLHQDWLNGKEYKCKVSNKALPAPIEKTISKAKGQPREPQVYTLPPSRDELTKNQVSLTCLVKGFYPSDIAVEWESNGQPENNYKTTPPVLDSDGSFFKKLTVDKSRWQQGNVFSCSVLHEALHSHYTQKSLSLSPG

SEQ ID NO: 89 - protein, 943 aa, synthetic construct
  REGION 1..943: note = MX367 B1-182   A19-61 CL-CH1 - peptide
EIVLTQSPGTLSLSPGERATLSCRASQSVSSSYLAWYQQKPGQAPRLLIYGASSRATGFPDRFSGSGSGTDFTLTISRLEPEDFAVYYCQQYGNSPWTFGQGTKVEIRGGSSGDIQMTQSPSSVSASVGDRVIITCRASQGISSWLAWYQQKPGKAPKVLIYDASSLQSGVPSRFSGSGYGTDFTLTISSLQPEDSATYYCQQAKSFPITFGQGTRLEIKGGGGSGGSGSGGGGSASGSGQVQLVESGGGVVQPGRSLRLSCAASGFTFSSYAFHWVRQAPGKGLEWVAVISYDGSNQYYADSVKGRFTISRDNSKNTLYLQMNSLRADDTAVYYCARDLAIAVAGTWHYYNGMDVWGQGTTVTVSSGGSSGQMQLVQSGPEVKKPGTSVKVSCKASGFTFTSSAVQWVRQRQRLEWIGWIVVGSGNTNYAQKFQERVTITRDMSTSTAYMELSSLRSEDTAVYYCAAPYCSGGSCFDGFDIWGQGTMVTVSSRTVAAPSVFIFPPSDEQLKSGTASVVCLLNNFYPREAKVQWKVDNALQSGNSQESVTEQDSKDSTYSLSSTLTLSKADYEKHKVYACEVTHQGLSSPVTKSFNRGECGGGGSGGSGSGGGGSASGSGASTKGPSVFPLAPSSKSTSGGTAALGCLVKDYFPEPVTVSWNSGALTSGVHTFPAVLQSSGSLSSVVTVPSSSLGTQTYICNVNHKPSNTKVDKKVEPKSCDKTHTCPPCPAPELLGGPSVFLFPPKPKDTLMISRTPEVTCVVVDVSHEDPEVKFNWYVDGVEVHNAKTKPREEQYNSYVVSVLTVLHQDWLNGKEYKCKVSNKALPAPIEKTISKAKGQPREPQVYTLPPSRDELTKNQVSLTCLVKGFYPSDIAVEWESNGQPENNYKTTPPVLDSDGSFFKKLTVDKSRWQQGNVFSCSVLHEALHSHYTQKSLSLSPG

SEQ ID NO: 90 - protein, 721 aa, synthetic construct
  REGION 1..721: note = MX412 A23-58H/B1-182L   A19-61 - peptide
EIVLTQSPGTLSLSPGERATLSCRASQSVSSSYLAWYQQKPGQAPRLLIYGASSRATGFPDRFSGSGSGTDFTLTISRLEPEDFAVYYCQQYGNSPWTFGQGTKVEIRGGSSGDIQMTQSPSSVSASVGDRVIITCRASQGISSWLAWYQQKPGKAPKVLIYDASSLQSGVPSRFSGSGYGTDFTLTISSLQPEDSATYYCQQAKSFPITFGQGTRLEIKGGGGSGGSGSGGGGSASGSGQVQLVESGGGVVQPGRSLRLSCAASGFTFSSYAFHWVRQAPGKGLEWVAVISYDGSNQYYADSVKGRFTISRDNSKNTLYLQMNSLRADDTAVYYCARDLAIAVAGTWHYYNGMDVWGQGTTVTVSSGGSSGQMQLVQSGPEVKKPGTSVKVSCKASGFTFTSSAVQWVRQRQRLEWIGWIVVGSGNTNYAQKFQERVTITRDMSTSTAYMELSSLRSEDTAVYYCAAPNCSNVVCYDGFDIWGQGTMVTVSSASGGSGDKTHTCPPCPAPELLGGPSVFLFPPKPKDTLMISRTPEVTCVVVDVSHEDPEVKFNWYVDGVEVHNAKTKPREEQYNSYVVSVLTVLHQDWLNGKEYKCKVSNKALPAPIEKTISKAKGQPREPQVYTLPPSRDELTKNQVSLTCLVKGFYPSDIAVEWESNGQPENNYKTTPPVLDSDGSFFKKLTVDKSRWQQGNVFSCSVLHEALHSHYTQKSLSLSPG

SEQ ID NO: 91 - protein, 721 aa, synthetic construct
  REGION 1..721: note = MX413 A19-61   A23-58H/B1-182L - peptide
DIQMTQSPSSVSASVGDRVIITCRASQGISSWLAWYQQKPGKAPKVLIYDASSLQSGVPSRFSGSGYGTDFTLTISSLQPEDSATYYCQQAKSFPITFGQGTRLEIKGGSSGEIVLTQSPGTLSLSPGERATLSCRASQSVSSSYLAWYQQKPGQAPRLLIYGASSRATGFPDRFSGSGSGTDFTLTISRLEPEDFAVYYCQQYGNSPWTFGQGTKVEIRGGGGSGGSGSGGGGSASGSGQMQLVQSGPEVKKPGTSVKVSCKASGFTFTSSAVQWVRQRQRLEWIGWIVVGSGNTNYAQKFQERVTITRDMSTSTAYMELSSLRSEDTAVYYCAAPNCSNVVCYDGFDIWGQGTMVTVSSGGSSGQVQLVESGGGVVQPGRSLRLSCAASGFTFSSYAFHWVRQAPGKGLEWVAVISYDGSNQYYADSVKGRFTISRDNSKNTLYLQMNSLRADDTAVYYCARDLAIAVAGTWHYYNGMDVWGQGTTVTVSSASGGSGDKTHTCPPCPAPELLGGPSVFLFPPKPKDTLMISRTPEVTCVVVDVSHEDPEVKFNWYVDGVEVHNAKTKPREEQYNSYVVSVLTVLHQDWLNGKEYKCKVSNKALPAPIEKTISKAKGQPREPQVYTLPPSRDELTKNQVSLTCLVKGFYPSDIAVEWESNGQPENNYKTTPPVLDSDGSFFKKLTVDKSRWQQGNVFSCSVLHEALHSHYTQKSLSLSPG

SEQ ID NO: 92 - protein, 943 aa, synthetic construct
  REGION 1..943: note = MX467 A23-58H/B1-182L   A19-61 CL-CH1 - peptide
EIVLTQSPGTLSLSPGERATLSCRASQSVSSSYLAWYQQKPGQAPRLLIYGASSRATGFPDRFSGSGSGTDFTLTISRLEPEDFAVYYCQQYGNSPWTFGQGTKVEIRGGSSGDIQMTQSPSSVSASVGDRVIITCRASQGISSWLAWYQQKPGKAPKVLIYDASSLQSGVPSRFSGSGYGTDFTLTISSLQPEDSATYYCQQAKSFPITFGQGTRLEIKGGGGSGGSGSGGGGSASGSGQVQLVESGGGVVQPGRSLRLSCAASGFTFSSYAFHWVRQAPGKGLEWVAVISYDGSNQYYADSVKGRFTISRDNSKNTLYLQMNSLRADDTAVYYCARDLAIAVAGTWHYYNGMDVWGQGTTVTVSSGGSSGQMQLVQSGPEVKKPGTSVKVSCKASGFTFTSSAVQWVRQRQRLEWIGWIVVGSGNTNYAQKFQERVTITRDMSTSTAYMELSSLRSEDTAVYYCAAPNCSNVVCYDGFDIWGQGTMVTVSSRTVAAPSVFIFPPSDEQLKSGTASVVCLLNNFYPREAKVQWKVDNALQSGNSQESVTEQDSKDSTYSLSSTLTLSKADYEKHKVYACEVTHQGLSSPVTKSFNRGECGGGGSGGSGSGGGGSASGSGASTKGPSVFPLAPSSKSTSGGTAALGCLVKDYFPEPVTVSWNSGALTSGVHTFPAVLQSSGSLSSVVTVPSSSLGTQTYICNVNHKPSNTKVDKKVEPKSCDKTHTCPPCPAPELLGGPSVFLFPPKPKDTLMISRTPEVTCVVVDVSHEDPEVKFNWYVDGVEVHNAKTKPREEQYNSYVVSVLTVLHQDWLNGKEYKCKVSNKALPAPIEKTISKAKGQPREPQVYTLPPSRDELTKNQVSLTCLVKGFYPSDIAVEWESNGQPENNYKTTPPVLDSDGSFFKKLTVDKSRWQQGNVFSCSVLHEALHSHYTQKSLSLSPG

SEQ ID NO: 93 - protein, 943 aa, synthetic construct
  REGION 1..943: note = MX468 - A19-61   A23-58H/B1-182L CL-CH1 peptide
DIQMTQSPSSVSASVGDRVIITCRASQGISSWLAWYQQKPGKAPKVLIYDASSLQSGVPSRFSGSGYGTDFTLTISSLQPEDSATYYCQQAKSFPITFGQGTRLEIKGGSSGEIVLTQSPGTLSLSPGERATLSCRASQSVSSSYLAWYQQKPGQAPRLLIYGASSRATGFPDRFSGSGSGTDFTLTISRLEPEDFAVYYCQQYGNSPWTFGQGTKVEIRGGGGSGGSGSGGGGSASGSGQMQLVQSGPEVKKPGTSVKVSCKASGFTFTSSAVQWVRQRQRLEWIGWIVVGSGNTNYAQKFQERVTITRDMSTSTAYMELSSLRSEDTAVYYCAAPNCSNVVCYDGFDIWGQGTMVTVSSGGSSGQVQLVESGGGVVQPGRSLRLSCAASGFTFSSYAFHWVRQAPGKGLEWVAVISYDGSNQYYADSVKGRFTISRDNSKNTLYLQMNSLRADDTAVYYCARDLAIAVAGTWHYYNGMDVWGQGTTVTVSSRTVAAPSVFIFPPSDEQLKSGTASVVCLLNNFYPREAKVQWKVDNALQSGNSQESVTEQDSKDSTYSLSSTLTLSKADYEKHKVYACEVTHQGLSSPVTKSFNRGECGGGGSGGSGSGGGGSASGSGASTKGPSVFPLAPSSKSTSGGTAALGCLVKDYFPEPVTVSWNSGALTSGVHTFPAVLQSSGSLSSVVTVPSSSLGTQTYICNVNHKPSNTKVDKKVEPKSCDKTHTCPPCPAPELLGGPSVFLFPPKPKDTLMISRTPEVTCVVVDVSHEDPEVKFNWYVDGVEVHNAKTKPREEQYNSYVVSVLTVLHQDWLNGKEYKCKVSNKALPAPIEKTISKAKGQPREPQVYTLPPSRDELTKNQVSLTCLVKGFYPSDIAVEWESNGQPENNYKTTPPVLDSDGSFFKKLTVDKSRWQQGNVFSCSVLHEALHSHYTQKSLSLSPG

SEQ ID NO: 94 - protein, 721 aa, synthetic construct
  REGION 1..721: note = MX490 A23-58H/B1-182L   A19-46 - peptide
EIVLTQSPGTLSLSPGERATLSCRASQSVSSSYLAWYQQKPGQAPRLLIYGASSRATGFPDRFSGSGSGTDFTLTISRLEPEDFAVYYCQQYGNSPWTFGQGTKVEIRGGSSGQTVVTQEPSFSVSPGGTVTLTCGLSSGSVSTAYFPSWYQQTPGQAPRTLIYGTNTRSSGVPDRFSGSILGNKAALTITGAQADDESDYYCVLYMGRGIVVFGGGTKLTVLGGGGSGGSGSGGGGSASGSGQVQLVESGGGVVQPGRSLRLSCAASGFTLSSYGMHWVRQAPGKGLEWVAVISYDGSNKYYVDSVKGRFTISRDNSKNTLYLQMNSLRAEDTAVYYCRWAYWELLPDYYYGMDVWGQGTTVTVSSGGSSGQMQLVQSGPEVKKPGTSVKVSCKASGFTFTSSAVQWVRQRQRLEWIGWIVVGSGNTNYAQKFQERVTITRDMSTSTAYMELSSLRSEDTAVYYCAAPNCSNVVCYDGFDIWGQGTMVTVSSASGGSGDKTHTCPPCPAPELLGGPSVFLFPPKPKDTLMISRTPEVTCVVVDVSHEDPEVKFNWYVDGVEVHNAKTKPREEQYNSYVVSVLTVLHQDWLNGKEYKCKVSNKALPAPIEKTISKAKGQPREPQVYTLPPSRDELTKNQVSLTCLVKGFYPSDIAVEWESNGQPENNYKTTPPVLDSDGSFFKKLTVDKSRWQQGNVFSCSVLHEALHSHYTQKSLSLSPG

SEQ ID NO: 95 - protein, 943 aa, synthetic construct
  REGION 1..943: note = MX491 A23-58H/B1-182L   A19-46 CL-CH1 - peptide
EIVLTQSPGTLSLSPGERATLSCRASQSVSSSYLAWYQQKPGQAPRLLIYGASSRATGFPDRFSGSGSGTDFTLTISRLEPEDFAVYYCQQYGNSPWTFGQGTKVEIRGGSSGQTVVTQEPSFSVSPGGTVTLTCGLSSGSVSTAYFPSWYQQTPGQAPRTLIYGTNTRSSGVPDRFSGSILGNKAALTITGAQADDESDYYCVLYMGRGIVVFGGGTKLTVLGGGGSGGSGSGGGGSASGSGQVQLVESGGGVVQPGRSLRLSCAASGFTLSSYGMHWVRQAPGKGLEWVAVISYDGSNKYYVDSVKGRFTISRDNSKNTLYLQMNSLRAEDTAVYYCRWAYWELLPDYYYGMDVWGQGTTVTVSSGGSSGQMQLVQSGPEVKKPGTSVKVSCKASGFTFTSSAVQWVRQRQRLEWIGWIVVGSGNTNYAQKFQERVTITRDMSTSTAYMELSSLRSEDTAVYYCAAPNCSNVVCYDGFDIWGQGTMVTVSSRTVAAPSVFIFPPSDEQLKSGTASVVCLLNNFYPREAKVQWKVDNALQSGNSQESVTEQDSKDSTYSLSSTLTLSKADYEKHKVYACEVTHQGLSSPVTKSFNRGECGGGGSGGSGSGGGGSASGSGASTKGPSVFPLAPSSKSTSGGTAALGCLVKDYFPEPVTVSWNSGALTSGVHTFPAVLQSSGSLSSVVTVPSSSLGTQTYICNVNHKPSNTKVDKKVEPKSCDKTHTCPPCPAPELLGGPSVFLFPPKPKDTLMISRTPEVTCVVVDVSHEDPEVKFNWYVDGVEVHNAKTKPREEQYNSYVVSVLTVLHQDWLNGKEYKCKVSNKALPAPIEKTISKAKGQPREPQVYTLPPSRDELTKNQVSLTCLVKGFYPSDIAVEWESNGQPENNYKTTPPVLDSDGSFFKKLTVDKSRWQQGNVFSCSVLHEALHSHYTQKSLSLSPG

SEQ ID NO: 96 - protein, 721 aa, synthetic construct
  REGION 1..721: note = MX492 A19-46   A23-58H/B1-182L - peptide
QTVVTQEPSFSVSPGGTVTLTCGLSSGSVSTAYFPSWYQQTPGQAPRTLIYGTNTRSSGVPDRFSGSILGNKAALTITGAQADDESDYYCVLYMGRGIVVFGGGTKLTVLGGSSGEIVLTQSPGTLSLSPGERATLSCRASQSVSSSYLAWYQQKPGQAPRLLIYGASSRATGFPDRFSGSGSGTDFTLTISRLEPEDFAVYYCQQYGNSPWTFGQGTKVEIRGGGGSGGSGSGGGGSASGSGQMQLVQSGPEVKKPGTSVKVSCKASGFTFTSSAVQWVRQRQRLEWIGWIVVGSGNTNYAQKFQERVTITRDMSTSTAYMELSSLRSEDTAVYYCAAPNCSNVVCYDGFDIWGQGTMVTVSSGGSSGQVQLVESGGGVVQPGRSLRLSCAASGFTLSSYGMHWVRQAPGKGLEWVAVISYDGSNKYYVDSVKGRFTISRDNSKNTLYLQMNSLRAEDTAVYYCRWAYWELLPDYYYGMDVWGQGTTVTVSSASGGSGDKTHTCPPCPAPELLGGPSVFLFPPKPKDTLMISRTPEVTCVVVDVSHEDPEVKFNWYVDGVEVHNAKTKPREEQYNSYVVSVLTVLHQDWLNGKEYKCKVSNKALPAPIEKTISKAKGQPREPQVYTLPPSRDELTKNQVSLTCLVKGFYPSDIAVEWESNGQPENNYKTTPPVLDSDGSFFKKLTVDKSRWQQGNVFSCSVLHEALHSHYTQKSLSLSPG

SEQ ID NO: 97 - protein, 943 aa, synthetic construct
  REGION 1..943: note = MX493 A19-46   A23-58H/B1-182L CL-CH1 - peptide
QTVVTQEPSFSVSPGGTVTLTCGLSSGSVSTAYFPSWYQQTPGQAPRTLIYGTNTRSSGVPDRFSGSILGNKAALTITGAQADDESDYYCVLYMGRGIVVFGGGTKLTVLGGSSGEIVLTQSPGTLSLSPGERATLSCRASQSVSSSYLAWYQQKPGQAPRLLIYGASSRATGFPDRFSGSGSGTDFTLTISRLEPEDFAVYYCQQYGNSPWTFGQGTKVEIRGGGGSGGSGSGGGGSASGSGQMQLVQSGPEVKKPGTSVKVSCKASGFTFTSSAVQWVRQRQRLEWIGWIVVGSGNTNYAQKFQERVTITRDMSTSTAYMELSSLRSEDTAVYYCAAPNCSNVVCYDGFDIWGQGTMVTVSSGGSSGQVQLVESGGGVVQPGRSLRLSCAASGFTLSSYGMHWVRQAPGKGLEWVAVISYDGSNKYYVDSVKGRFTISRDNSKNTLYLQMNSLRAEDTAVYYCRWAYWELLPDYYYGMDVWGQGTTVTVSSRTVAAPSVFIFPPSDEQLKSGTASVVCLLNNFYPREAKVQWKVDNALQSGNSQESVTEQDSKDSTYSLSSTLTLSKADYEKHKVYACEVTHQGLSSPVTKSFNRGECGGGGSGGSGSGGGGSASGSGASTKGPSVFPLAPSSKSTSGGTAALGCLVKDYFPEPVTVSWNSGALTSGVHTFPAVLQSSGSLSSVVTVPSSSLGTQTYICNVNHKPSNTKVDKKVEPKSCDKTHTCPPCPAPELLGGPSVFLFPPKPKDTLMISRTPEVTCVVVDVSHEDPEVKFNWYVDGVEVHNAKTKPREEQYNSYVVSVLTVLHQDWLNGKEYKCKVSNKALPAPIEKTISKAKGQPREPQVYTLPPSRDELTKNQVSLTCLVKGFYPSDIAVEWESNGQPENNYKTTPPVLDSDGSFFKKLTVDKSRWQQGNVFSCSVLHEALHSHYTQKSLSLSPG

SEQ ID NO: 98 - protein, 721 aa, synthetic construct
  REGION 1..721: note = MX494 A19-61   B1-182 L1 IgG1 Kcc - peptide
DIQMTQSPSSVSASVGDRVIITCRASQGISSWLAWYQQKPGKAPKVLIYDASSLQSGVPSRFSGSGYGTDFTLTISSLQPEDSATYYCQQAKSFPITFGQGTRLEIKGGSSGEIVLTQSPGTLSLSPGERATLSCRASQSVSSSYLAWYQQKPGQAPRLLIYGASSRATGFPDRFSGSGSGTDFTLTISRLEPEDFAVYYCQQYGNSPWTFGQGTKVEIRGGGGSGGSGSGGGGSASGSGQMQLVQSGPEVKKPGTSVKVSCKASGFTFTSSAVQWVRQRQRLEWIGWIVVGSGNTNYAQKFQERVTITRDMSTSTAYMELSSLRSEDTAVYYCAAPYCSGGSCFDGFDIWGQGTMVTVSSGGSSGQVQLVESGGGVVQPGRSLRLSCAASGFTFSSYAFHWVRQAPGKGLEWVAVISYDGSNQYYADSVKGRFTISRDNSKNTLYLQMNSLRADDTAVYYCARDLAIAVAGTWHYYNGMDVWGQGTTVTVSSASGGSGDKTHTCPPCPAPELLGGPSVFLFPPKPKDTLMISRTPEVTCVVVDVSHEDPEVKFNWYVDGVEVHNAKTKPREEQYNSYVVSVLTVLHQDWLNGKEYKCKVSNKALPAPIEKTISKAKGQPREPQVYTLPPCRDELTKNQVSLWCLVKGFYPSDIAVEWESNGQPENNYKTTPPVLDSDGSFFKKLTVDKSRWQQGNVFSCSVMHEALHNHYTQKSLSLSPG

SEQ ID NO: 99 - protein, 723 aa, synthetic construct
  REGION 1..723: note = MX494 A19-46   B1-182 L1 IgG1 Hcc - peptide
QTVVTQEPSFSVSPGGTVTLTCGLSSGSVSTAYFPSWYQQTPGQAPRTLIYGTNTRSSGVPDRFSGSILGNKAALTITGAQADDESDYYCVLYMGRGIVVFGGGTKLTVLGGSSGEIVLTQSPGTLSLSPGERATLSCRASQSVSSSYLAWYQQKPGQAPRLLIYGASSRATGFPDRFSGSGSGTDFTLTISRLEPEDFAVYYCQQYGNSPWTFGQGTKVEIRGGGGSGGSGSGGGGSASGSGQMQLVQSGPEVKKPGTSVKVSCKASGFTFTSSAVQWVRQRQRLEWIGWIVVGSGNTNYAQKFQERVTITRDMSTSTAYMELSSLRSEDTAVYYCAAPYCSGGSCFDGFDIWGQGTMVTVSSGGSSGQVQLVESGGGVVQPGRSLRLSCAASGFTLSSYGMHWVRQAPGKGLEWVAVISYDGSNKYYVDSVKGRFTISRDNSKNTLYLQMNSLRAEDTAVYYCRWAYWELLPDYYYGMDVWGQGTTVTVSSASGGSGDKTHTCPPCPAPELLGGPSVFLFPPKPKDTLMISRTPEVTCVVVDVSHEDPEVKFNWYVDGVEVHNAKTKPREEQYNSYVVSVLTVLHQDWLNGKEYKCKVSNKALPAPIEKTISKAKGQPREPQVCTLPPSRDELTKNQVSLSCAVKGFYPSDIAVEWESNGQPENNYKTTPPVLDSDGSFFLVSKLTVDKSRWQQGNVFSCSVMHEALHNHYTQKSLSLSPG

SEQ ID NO: 100 - protein, 721 aa, synthetic construct; identical to SEQ ID NO: 98
  REGION 1..721: note = MX495 A19-61   B1-182 L1 IgG1 Kcc- peptide

SEQ ID NO: 101 - protein, 723 aa, synthetic construct
  REGION 1..723: note = MX495 B1-182   A19-46 L1 IgG1 Hcc - peptide
EIVLTQSPGTLSLSPGERATLSCRASQSVSSSYLAWYQQKPGQAPRLLIYGASSRATGFPDRFSGSGSGTDFTLTISRLEPEDFAVYYCQQYGNSPWTFGQGTKVEIRGGSSGQTVVTQEPSFSVSPGGTVTLTCGLSSGSVSTAYFPSWYQQTPGQAPRTLIYGTNTRSSGVPDRFSGSILGNKAALTITGAQADDESDYYCVLYMGRGIVVFGGGTKLTVLGGGGSGGSGSGGGGSASGSGQVQLVESGGGVVQPGRSLRLSCAASGFTLSSYGMHWVRQAPGKGLEWVAVISYDGSNKYYVDSVKGRFTISRDNSKNTLYLQMNSLRAEDTAVYYCRWAYWELLPDYYYGMDVWGQGTTVTVSSGGSSGQMQLVQSGPEVKKPGTSVKVSCKASGFTFTSSAVQWVRQRQRLEWIGWIVVGSGNTNYAQKFQERVTITRDMSTSTAYMELSSLRSEDTAVYYCAAPYCSGGSCFDGFDIWGQGTMVTVSSASGGSGDKTHTCPPCPAPELLGGPSVFLFPPKPKDTLMISRTPEVTCVVVDVSHEDPEVKFNWYVDGVEVHNAKTKPREEQYNSYVVSVLTVLHQDWLNGKEYKCKVSNKALPAPIEKTISKAKGQPREPQVCTLPPSRDELTKNQVSLSCAVKGFYPSDIAVEWESNGQPENNYKTTPPVLDSDGSFFLVSKLTVDKSRWQQGNVFSCSVMHEALHNHYTQKSLSLSPG

SEQ ID NO: 102 - protein, 721 aa, synthetic construct
  REGION 1..721: note = MX496 B1-182   A19-61 L1 IgG1 Kcc - peptide
EIVLTQSPGTLSLSPGERATLSCRASQSVSSSYLAWYQQKPGQAPRLLIYGASSRATGFPDRFSGSGSGTDFTLTISRLEPEDFAVYYCQQYGNSPWTFGQGTKVEIRGGSSGDIQMTQSPSSVSASVGDRVIITCRASQGISSWLAWYQQKPGKAPKVLIYDASSLQSGVPSRFSGSGYGTDFTLTISSLQPEDSATYYCQQAKSFPITFGQGTRLEIKGGGGSGGSGSGGGGSASGSGQVQLVESGGGVVQPGRSLRLSCAASGFTFSSYAFHWVRQAPGKGLEWVAVISYDGSNQYYADSVKGRFTISRDNSKNTLYLQMNSLRADDTAVYYCARDLAIAVAGTWHYYNGMDVWGQGTTVTVSSGGSSGQMQLVQSGPEVKKPGTSVKVSCKASGFTFTSSAVQWVRQRQRLEWIGWIVVGSGNTNYAQKFQERVTITRDMSTSTAYMELSSLRSEDTAVYYCAAPYCSGGSCFDGFDIWGQGTMVTVSSASGGSGDKTHTCPPCPAPELLGGPSVFLFPPKPKDTLMISRTPEVTCVVVDVSHEDPEVKFNWYVDGVEVHNAKTKPREEQYNSYVVSVLTVLHQDWLNGKEYKCKVSNKALPAPIEKTISKAKGQPREPQVYTLPPCRDELTKNQVSLWCLVKGFYPSDIAVEWESNGQPENNYKTTPPVLDSDGSFFKKLTVDKSRWQQGNVFSCSVMHEALHNHYTQKSLSLSPG

SEQ ID NO: 103 - protein, 723 aa, synthetic construct; identical to SEQ ID NO: 99
  REGION 1..723: note = MX496 A19-46   B1-182 L1 IgG1 Hcc - peptide

SEQ ID NO: 104 - protein, 721 aa, synthetic construct; identical to SEQ ID NO: 102
  REGION 1..721: note = MX497 B1-182   A19-61 L1 IgG1 Kcc - peptide

SEQ ID NO: 105 - protein, 723 aa, synthetic construct; identical to SEQ ID NO: 101
  REGION 1..723: note = MX497 B1-182   A19-46 L1 IgG1 Hcc - peptide

SEQ ID NO: 106 - protein, 721 aa, synthetic construct
  REGION 1..721: note = MX498 A23-58H/B1-182L   A19-46 L1 IgG1 Kcc LS - peptide
EIVLTQSPGTLSLSPGERATLSCRASQSVSSSYLAWYQQKPGQAPRLLIYGASSRATGFPDRFSGSGSGTDFTLTISRLEPEDFAVYYCQQYGNSPWTFGQGTKVEIRGGSSGQTVVTQEPSFSVSPGGTVTLTCGLSSGSVSTAYFPSWYQQTPGQAPRTLIYGTNTRSSGVPDRFSGSILGNKAALTITGAQADDESDYYCVLYMGRGIVVFGGGTKLTVLGGGGSGGSGSGGGGSASGSGQVQLVESGGGVVQPGRSLRLSCAASGFTLSSYGMHWVRQAPGKGLEWVAVISYDGSNKYYVDSVKGRFTISRDNSKNTLYLQMNSLRAEDTAVYYCRWAYWELLPDYYYGMDVWGQGTTVTVSSGGSSGQMQLVQSGPEVKKPGTSVKVSCKASGFTFTSSAVQWVRQRQRLEWIGWIVVGSGNTNYAQKFQERVTITRDMSTSTAYMELSSLRSEDTAVYYCAAPNCSNVVCYDGFDIWGQGTMVTVSSASGGSGDKTHTCPPCPAPELLGGPSVFLFPPKPKDTLMISRTPEVTCVVVDVSHEDPEVKFNWYVDGVEVHNAKTKPREEQYNSYVVSVLTVLHQDWLNGKEYKCKVSNKALPAPIEKTISKAKGQPREPQVYTLPPCRDELTKNQVSLWCLVKGFYPSDIAVEWESNGQPENNYKTTPPVLDSDGSFFKKLTVDKSRWQQGNVFSCSVLHEALHSHYTQKSLSLSPG

SEQ ID NO: 107 - protein, 723 aa, synthetic construct
  REGION 1..723: note = MX498 A23-58H/B1-182L   A19-61 L1 IgG1 Hcc LS - peptide
EIVLTQSPGTLSLSPGERATLSCRASQSVSSSYLAWYQQKPGQAPRLLIYGASSRATGFPDRFSGSGSGTDFTLTISRLEPEDFAVYYCQQYGNSPWTFGQGTKVEIRGGSSGDIQMTQSPSSVSASVGDRVIITCRASQGISSWLAWYQQKPGKAPKVLIYDASSLQSGVPSRFSGSGYGTDFTLTISSLQPEDSATYYCQQAKSFPITFGQGTRLEIKGGGGSGGSGSGGGGSASGSGQVQLVESGGGVVQPGRSLRLSCAASGFTFSSYAFHWVRQAPGKGLEWVAVISYDGSNQYYADSVKGRFTISRDNSKNTLYLQMNSLRADDTAVYYCARDLAIAVAGTWHYYNGMDVWGQGTTVTVSSGGSSGQMQLVQSGPEVKKPGTSVKVSCKASGFTFTSSAVQWVRQRQRLEWIGWIVVGSGNTNYAQKFQERVTITRDMSTSTAYMELSSLRSEDTAVYYCAAPNCSNVVCYDGFDIWGQGTMVTVSSASGGSGDKTHTCPPCPAPELLGGPSVFLFPPKPKDTLMISRTPEVTCVVVDVSHEDPEVKFNWYVDGVEVHNAKTKPREEQYNSYVVSVLTVLHQDWLNGKEYKCKVSNKALPAPIEKTISKAKGQPREPQVCTLPPSRDELTKNQVSLSCAVKGFYPSDIAVEWESNGQPENNYKTTPPVLDSDGSFFLVSKLTVDKSRWQQGNVFSCSVLHEALHSHYTQKSLSLSPG

SEQ ID NO: 108 - protein, 721 aa, synthetic construct; identical to SEQ ID NO: 106
  REGION 1..721: note = MX499 A23-58H/B1-182L   A19-46 L1 IgG1 Kcc LS - peptide

SEQ ID NO: 109 - protein, 723 aa, synthetic construct
  REGION 1..723: note = MX499 A19-61   A23-58H/B1-182L L1 IgG1 Hcc LS - peptide
DIQMTQSPSSVSASVGDRVIITCRASQGISSWLAWYQQKPGKAPKVLIYDASSLQSGVPSRFSGSGYGTDFTLTISSLQPEDSATYYCQQAKSFPITFGQGTRLEIKGGSSGEIVLTQSPGTLSLSPGERATLSCRASQSVSSSYLAWYQQKPGQAPRLLIYGASSRATGFPDRFSGSGSGTDFTLTISRLEPEDFAVYYCQQYGNSPWTFGQGTKVEIRGGGGSGGSGSGGGGSASGSGQMQLVQSGPEVKKPGTSVKVSCKASGFTFTSSAVQWVRQRQRLEWIGWIVVGSGNTNYAQKFQERVTITRDMSTSTAYMELSSLRSEDTAVYYCAAPNCSNVVCYDGFDIWGQGTMVTVSSGGSSGQVQLVESGGGVVQPGRSLRLSCAASGFTFSSYAFHWVRQAPGKGLEWVAVISYDGSNQYYADSVKGRFTISRDNSKNTLYLQMNSLRADDTAVYYCARDLAIAVAGTWHYYNGMDVWGQGTTVTVSSASGGSGDKTHTCPPCPAPELLGGPSVFLFPPKPKDTLMISRTPEVTCVVVDVSHEDPEVKFNWYVDGVEVHNAKTKPREEQYNSYVVSVLTVLHQDWLNGKEYKCKVSNKALPAPIEKTISKAKGQPREPQVCTLPPSRDELTKNQVSLSCAVKGFYPSDIAVEWESNGQPENNYKTTPPVLDSDGSFFLVSKLTVDKSRWQQGNVFSCSVLHEALHSHYTQKSLSLSPG

SEQ ID NO: 110 - protein, 721 aa, synthetic construct
  REGION 1..721: note = MX500 A19-46   A23-58H/B1-182L L1 IgG1 Kcc LS - peptide
QTVVTQEPSFSVSPGGTVTLTCGLSSGSVSTAYFPSWYQQTPGQAPRTLIYGTNTRSSGVPDRFSGSILGNKAALTITGAQADDESDYYCVLYMGRGIVVFGGGTKLTVLGGSSGEIVLTQSPGTLSLSPGERATLSCRASQSVSSSYLAWYQQKPGQAPRLLIYGASSRATGFPDRFSGSGSGTDFTLTISRLEPEDFAVYYCQQYGNSPWTFGQGTKVEIRGGGGSGGSGSGGGGSASGSGQMQLVQSGPEVKKPGTSVKVSCKASGFTFTSSAVQWVRQRQRLEWIGWIVVGSGNTNYAQKFQERVTITRDMSTSTAYMELSSLRSEDTAVYYCAAPNCSNVVCYDGFDIWGQGTMVTVSSGGSSGQVQLVESGGGVVQPGRSLRLSCAASGFTLSSYGMHWVRQAPGKGLEWVAVISYDGSNKYYVDSVKGRFTISRDNSKNTLYLQMNSLRAEDTAVYYCRWAYWELLPDYYYGMDVWGQGTTVTVSSASGGSGDKTHTCPPCPAPELLGGPSVFLFPPKPKDTLMISRTPEVTCVVVDVSHEDPEVKFNWYVDGVEVHNAKTKPREEQYNSYVVSVLTVLHQDWLNGKEYKCKVSNKALPAPIEKTISKAKGQPREPQVYTLPPCRDELTKNQVSLWCLVKGFYPSDIAVEWESNGQPENNYKTTPPVLDSDGSFFKKLTVDKSRWQQGNVFSCSVLHEALHSHYTQKSLSLSPG

SEQ ID NO: 111 - protein, 723 aa, synthetic construct; identical to SEQ ID NO: 107
  REGION 1..723: note = MX500 A23-58H/B1-182L   A19-61 L1 IgG1 Hcc LS - peptide

SEQ ID NO: 112 - protein, 721 aa, synthetic construct; identical to SEQ ID NO: 110
  REGION 1..721: note = MX501 A19-46   A23-58H/B1-182L L1 IgG1 Kcc LS - peptide

SEQ ID NO: 113 - protein, 723 aa, synthetic construct; identical to SEQ ID NO: 109
  REGION 1..723: note = MX501 A19-61   A23-58H/B1-182L L1 IgG1 Hcc LS - peptide

SEQ ID NO: 114 - DNA, 1916 bp, synthetic construct
  misc_feature 1..1916: note = MX241 B1-182- DNA
  source 1..1916: mol_type = other DNA
gagatcgtgctgacacagagccctggcacactgtcactgtctccaggcgaaagagccacactgagctgtagagccagccagagcgtgtccagctcttacctggcttggtatcagcagaagcccggacaggctcccagactgctgatctatggcgcctctagcagagccaccggctttcccgatagattttctggcagcggctccggcaccgacttcaccctgacaatcagcagactggaacccgaggacttcgccgtgtactactgtcagcagtacggcaacagcccctggacatttggccagggcaccaaggtggaaatcagaggcggaagctctggcgaaattgtgctgacccagtctccagggactctgagccttagtcctggcgagagagctaccctgtcttgcagagcctctcagtccgtgtcctctagctatctcgcctggtatcaacaaaagcctgggcaagcccctcggctgctgatatacggtgcttccagccgcgccacaggcttccctgataggtttagcggctctggaagcggcacagatttcacactgaccatctctcggctggaacctgaagattttgccgtctattattgccagcagtatgggaactccccttggaccttcggacagggaacaaaggtcgagattagaggcggcggaggaagcggcggatctggatctggtggcggaggatctgcttctggctctggacagatgcagctggtgcagtctggccccgaagtgaagaaacctggcaccagcgtgaaggtgtcctgcaaggccagcggcttcacctttacaagctctgccgtgcagtgggtccgacaggcaagaggacaacggctggaatggatcggctggatcgttgtcggcagcggcaacaccaattacgcccagaaattccaagagcgcgtgaccatcaccagagacatgagcaccagcaccgcctacatggaactgagcagcctgagaagcgaggacacagcagtgtactattgcgccgctccttactgtagcggcggcagctgctttgacggctttgacatttggggacagggcactatggtcacagtgtcctctggcggatctagcggccagatgcaactcgttcagagcggacctgaagtgaaaaagcccggcacatccgtgaaagtgtcttgtaaagcctccgggttcaccttcaccagcagcgctgttcagtgggttcgccaagctagaggccagagacttgagtggattggatggatcgtcgttggctctggcaataccaactatgcccaaaagtttcaagagagggtcacaatcacccgcgacatgtccacctccacagcttatatggaactgtctagcctgcgctccgaggataccgctgtgtattactgcgctgccccttattgctccggcggctcctgtttcgatggcttcgatatttggggccagggaacaatggttactgtcagctctgccagcggaggctccggagacaaaactcacacatgcccaccgtgcccagcacctgaactcctggggggaccgtcagtcttcctcttccccccaaaacccaaggacaccctcatgatctcccggacccctgaggtcacatgcgtggtggtggacgtgagccacgaagaccctgaggtcaagttcaactggtacgtggacggcgtggaggtgcataatgccaagacaaagccgcgggaggagcagtacaacagcacgtaccgtgtggtcagcgtcctcaccgtcctgcaccaggactggctgaatggcaaggagtacaagtgcaaggtctccaacaaagccctcccagcccccatcgagaaaaccatctccaaagccaaagggcagccccgagaaccacaggtgtacaccctgcccccatcccgggatgagctgaccaagaa

SEQ ID NO: 115 - DNA, 2847 bp, synthetic construct
  misc_feature 1..2847: note = MX365 B1-182 CL-CH1 - DNA
  source 1..2847: mol_type = other DNA
gagatcgtgctgacacagagccctggcacactgtcactgtctccaggcgaaagagccacactgagctgtagagccagccagagcgtgtccagctcttacctggcttggtatcagcagaagcccggacaggctcccagactgctgatctatggcgcctctagcagagccaccggctttcccgatagattttctggcagcggctccggcaccgacttcaccctgacaatcagcagactggaacccgaggacttcgccgtgtactactgtcagcagtacggcaacagcccctggacatttggccagggcaccaaggtggaaatcagaggcggaagctctggcgaaattgtgctgacccagtctccagggactctgagccttagtcctggcgagagagctaccctgtcttgcagagcctctcagtccgtgtcctctagctatctcgcctggtatcaacaaaagcctgggcaagcccctcggctgctgatatacggtgcttccagccgcgccacaggcttccctgataggtttagcggctctggaagcggcacagatttcacactgaccatctctcggctggaacctgaagattttgccgtctattattgccagcagtatgggaactccccttggaccttcggacagggaacaaaggtcgagattagaggcggcggaggaagcggcggatctggatctggtggcggaggatctgcttctggctctggacagatgcagctggtgcagtctggccccgaagtgaagaaacctggcaccagcgtgaaggtgtcctgcaaggccagcggcttcacctttacaagctctgccgtgcagtgggtccgacaggcaagaggacaacggctggaatggatcggctggatcgttgtcggcagcggcaacaccaattacgcccagaaattccaagagcgcgtgaccatcaccagagacatgagcaccagcaccgcctacatggaactgagcagcctgagaagcgaggacacagcagtgtactattgcgccgctccttactgtagcggcggcagctgctttgacggctttgacatttggggacagggcactatggtcacagtgtcctctggcggatctagcggccagatgcaactcgttcagagcggacctgaagtgaaaaagcccggcacatccgtgaaagtgtcttgtaaagcctccgggttcaccttcaccagcagcgctgttcagtgggttcgccaagctagaggccagagacttgagtggattggatggatcgtcgttggctctggcaataccaactatgcccaaaagtttcaagagagggtcacaatcacccgcgacatgtccacctccacagcttatatggaactgtctagcctgcgctccgaggataccgctgtgtattactgcgctgccccttattgctccggcggctcctgtttcgatggcttcgatatttggggccagggaacaatggttactgtcagctctcgtacggtggccgctcccagcgtgttcatcttcccacctagcgacgagcagctgaagtccggcacagcctctgtcgtgtgcctgctgaacaacttctacccccgcgaggccaaagtgcagtggaaggtggacaacgccctgcagagcggcaacagccaggaaagcgtgaccgagcaggacagcaaggactccacctacagcctgagcagcaccctgacactgagcaaggccgactacgagaagcacaaggtgtacgcctgcgaagtgacccaccagggcctgtctagccccgtgaccaagagcttcaaccggggcgagtgtggtggcggaggtagcggaggcagcggcagcggaggaggcgggagcgccagcggcagcggagcttcgaccaagggcccatcggtcttccccctggcaccctcctccaagagcacctctgggggcacagcggccctgggctgcctggtcaaggactacttccccgaacccgtgacggtgtcgtggaactcaggcgccctgaccagcggcgtgcacaccttcccggctgtcctacagtcctcaggactctactccctcagcagcgtggtgaccgtgccctccagcagcttgggcacccagacctacatctgcaacgtgaatcacaagcccagcaacaccaaggtggacaagaaagttgagcccaaatcttgtgacaaaactcacacatgcccaccgtgcccagcacctgaactcctggggggaccgtcagtcttcctcttccccccaaaacccaaggacaccctcatgatctcccggacccctgaggtcacatgcgtggtggtggacgtgagccacgaagaccctgaggtcaagttcaactggtacgtggacggcgtggaggtgcataatgccaagacaaagccgcgggaggagcagtacaacagcacgtaccgtgtggtcagcgtcctcaccgtcctgcaccaggactggctgaatggcaaggagtacaagtgcaaggtctccaacaaagccctcccagcccccatcgagaaaaccatctccaaagccaaagggcagccccgagaaccacaggtgtacaccctgcccccatcccgggatgagctgaccaagaaccaggtcagcctgacctgcctggtcaaaggcttctatcccagcgacatcgccgtggagtgggagagcaatgggcagccggagaacaactacaagaccacgcctcccgtgctggactccgacggctccttcttcctctacagcaagctcaccgtggacaagagcaggtggcagcaggggaacgtcttctcatgctccgtgctgcatgaggctctgcacagccactacacgcagaagagcctctccctgtctccgggttga

SEQ ID NO: 116 - DNA, 2178 bp, synthetic construct
  misc_feature 1..2178: note = MX409 A23-58H/B1-182L - DNA
  source 1..2178: mol_type = other DNA
gagatcgtgctgacacagagccctggcacactgtcactgtctccaggcgaaagagccacactgagctgtagagccagccagagcgtgtccagctcttacctggcttggtatcagcagaagcccggacaggctcccagactgctgatctatggcgcctctagcagagccaccggctttcccgatagattttctggcagcggctccggcaccgacttcaccctgacaatcagcagactggaacccgaggacttcgccgtgtactactgtcagcagtacggcaacagcccctggacatttggccagggcaccaaggtggaaatcagaggcggaagctctggcgaaattgtgctgacccagtctccagggactctgagccttagtcctggcgagagagctaccctgtcttgcagagcctctcagtccgtgtcctctagctatctcgcctggtatcaacaaaagcctgggcaagcccctcggctgctgatatacggtgctagcagcagagctacaggcttccctgacaggtttagcggctctggaagcggcacagatttcacactgaccatctctcggctggaacctgaagattttgccgtctattattgccagcagtatgggaactccccttggaccttcggacagggaacaaaggtcgagattagaggcggcggaggaagcggcggatctggatctggtggcggaggatctgcttctggctctggacagatgcagctggtgcagtctggccccgaagtgaagaaacctggcaccagcgtgaaggtgtcctgcaaggccagcggcttcacctttacaagctctgccgtgcagtgggtccgacaggcaagaggacaacggctggaatggatcggctggatcgttgtcggcagcggcaacaccaattacgcccagaaattccaagagcgcgtgaccatcaccagagacatgagcaccagcaccgcctacatggaactgagcagcctgagaagcgaggacacagcagtgtactattgcgccgctcctaactgctccaacgtcgtgtgctacgacggcttcgatatctggggccagggaaccatggtcaccgtgtcaagtggcggatctagcggccagatgcaactcgttcagagcggacctgaagtgaaaaagcccggcacatccgtgaaagtgtcttgtaaagcctccgggttcaccttcaccagcagcgctgttcagtgggttcgccaagctagaggccagagactcgagtggattggatggatcgtcgttggctctggcaataccaactatgcccaaaagtttcaagagagggtcaccatcacacgcgacatgtccacctccacagcttatatggaactgtctagcctgcgctccgaggataccgctgtgtattactgcgctgcccctaattgcagcaatgtcgtgtgttatgatggatttgacatttggggacagggcacgatggttacagtgtcctctgcttctggcggctccggagataagacccacacatgtcctccatgtcctgctccagaactgctcggcggcccttctgtgttcctgtttcctccaaagcctaaggacaccctgatgatcagcagaacccctgaagtgacctgcgtggtggtggatgtgtctcacgaggaccccgaagtgaagttcaattggtacgtggacggcgtggaagtgcacaacgccaagaccaagcctagagaggaacagtacaacagcacctacagagtggtgtccgtgctgaccgtgctgcaccaggattggctgaacggcaaagagtacaagtgcaaggtgtccaacaaggccctgcctgctcctatcgagaaaaccatcagcaaggccaagggccagcctagggaaccccaggtttacacccttcctccaagccgggatgagctgaccaagaaccaggtgtccctgacatgtctcgtgaagggcttctaccccagcgacattgccgtggaatgggagagcaatggccagcctgagaacaactacaagacaacccctcctgtgctggacagcgacggctcattcttcctgtacagcaagctgacagtcgacaagtccagatggcagcagggcaacgtgttcagttgcagcgtgctgcacgaggccctgcacagtcactacacccagaagtccctgagcctgtctcctggatagtga

SEQ ID NO: 117 - DNA, 2847 bp, synthetic construct
  misc_feature 1..2847: note = MX466 A23-58H/B1-182L CL-CH1 - DNA
  source 1..2847: mol_type = other DNA
gagatcgtgctgacacagagccctggcacactgtcactgtctccaggcgaaagagccacactgagctgtagagccagccagagcgtgtccagctcttacctggcttggtatcagcagaagcccggacaggctcccagactgctgatctatggcgcctctagcagagccaccggctttcccgatagattttctggcagcggctccggcaccgacttcaccctgacaatcagcagactggaacccgaggacttcgccgtgtactactgtcagcagtacggcaacagcccctggacatttggccagggcaccaaggtggaaatcagaggcggaagctctggcgaaattgtgctgacccagtctccagggactctgagccttagtcctggcgagagagctaccctgtcttgcagagcctctcagtccgtgtcctctagctatctcgcctggtatcaacaaaagcctgggcaagcccctcggctgctgatatacggtgctagcagcagagctacaggcttccctgacaggtttagcggctctggaagcggcacagatttcacactgaccatctctcggctggaacctgaagattttgccgtctattattgccagcagtatgggaactccccttggaccttcggacagggaacaaaggtcgagattagaggcggcggaggaagcggcggatctggatctggtggcggaggatctgcttctggctctggacagatgcagctggtgcagtctggccccgaagtgaagaaacctggcaccagcgtgaaggtgtcctgcaaggccagcggcttcacctttacaagctctgccgtgcagtgggtccgacaggcaagaggacaacggctggaatggatcggctggatcgttgtcggcagcggcaacaccaattacgcccagaaattccaagagcgcgtgaccatcaccagagacatgagcaccagcaccgcctacatggaactgagcagcctgagaagcgaggacacagcagtgtactattgcgccgctcctaactgctccaacgtcgtgtgctacgacggcttcgatatctggggccagggaaccatggtcaccgtgtcaagtggcggatctagcggccagatgcaactcgttcagagcggacctgaagtgaaaaagcccggcacatccgtgaaagtgtcttgtaaagcctccgggttcaccttcaccagcagcgctgttcagtgggttcgccaagctagaggccagagactcgagtggattggatggatcgtcgttggctctggcaataccaactatgcccaaaagtttcaagagagggtcaccatcacacgcgacatgtccacctccacagcttatatggaactgtctagcctgcgctccgaggataccgctgtgtattactgcgctgcccctaattgcagcaatgtcgtgtgttatgatggatttgacatttggggacagggcacgatggttacagtgtcctctcgtacggtggccgctcccagcgtgttcatcttcccacctagcgacgagcagctgaagtccggcacagcctctgtcgtgtgcctgctgaacaacttctacccccgcgaggccaaagtgcagtggaaggtggacaacgccctgcagagcggcaacagccaggaaagcgtgaccgagcaggacagcaaggactccacctacagcctgagcagcaccctgacactgagcaaggccgactacgagaagcacaaggtgtacgcctgcgaagtgacccaccagggcctgtctagccccgtgaccaagagcttcaaccggggcgagtgtggtggcggaggtagcggaggcagcggcagcggaggaggcgggagcgccagcggcagcggagcttcgaccaagggcccatcggtcttccccctggcaccctcctccaagagcacctctgggggcacagcggccctgggctgcctggtcaaggactacttccccgaacccgtgacggtgtcgtggaactcaggcgccctgaccagcggcgtgcacaccttcccggctgtcctacagtcctcaggactctactccctcagcagcgtggtgaccgtgccctccagcagcttgggcacccagacctacatctgcaacgtgaatcacaagcccagcaacaccaaggtggacaagaaagttgagcccaaatcttgtgacaaaactcacacatgcccaccgtgcccagcacctgaactcctggggggaccgtcagtcttcctcttccccccaaaacccaaggacaccctcatgatctcccggacccctgaggtcacatgcgtggtggtggacgtgagccacgaagaccctgaggtcaagttcaactggtacgtggacggcgtggaggtgcataatgccaagacaaagccgcgggaggagcagtacaacagcacgtaccgtgtggtcagcgtcctcaccgtcctgcaccaggactggctgaatggcaaggagtacaagtgcaaggtctccaacaaagccctcccagcccccatcgagaaaaccatctccaaagccaaagggcagccccgagaaccacaggtgtacaccctgcccccatcccgggatgagctgaccaagaaccaggtcagcctgacctgcctggtcaaaggcttctatcccagcgacatcgccgtggagtgggagagcaatgggcagccggagaacaactacaagaccacgcctcccgtgctggactccgacggctccttcttcctctacagcaagctcaccgtggacaagagcaggtggcagcaggggaacgtcttctcatgctccgtgctgcatgaggctctgcacagccactacacgcagaagagcctctccctgtctccgggttga

SEQ ID NO: 118 - DNA, 2193 bp, synthetic construct
  misc_feature 1..2193: note = MX179 A19-46   B1-182 - DNA
  source 1..2193: mol_type = other DNA
cagaccgtggtcacacaagagcctagcttctccgtgtctcctggcggcacagtgacactgacatgtggccttagcagcggcagcgtgtccaccgcctattttcccagctggtatcagcagacccctggacaggctccccggacactgatctacggcaccaataccagatccagcggcgtgcccgatagattcagcggctctatcctgggcaacaaggccgcactgacaatcacaggcgcccaggccgatgacgagagcgattactactgcgtgctgtacatgggcagaggcatcgtggtttttggcggaggcaccaagctgacagtgctcggaggatcttctggcgagatcgtgctgacacagagccccggaacactgtcactgtctccaggcgaaagagccacactgagctgtagagccagccagagcgtgtcctctagctacctggcctggtatcaacaaaagcccggacaggcccctcggctgctgatatatggtgcctctagcagagccaccggctttcccgacagattttctggcagcggaagcggcaccgacttcaccctgaccatctccagactggaacccgaggacttcgccgtgtactactgtcagcagtacggcaacagcccctggacctttggccagggcacaaaggtggaaatcagaggcggaggtggaagcggcggaagtggatctggcggtggtggatctgcttctggctctggacagatgcagctggtgcagtctggccccgaagtgaagaaacctggcaccagcgtgaaggtgtcctgcaaggccagcggcttcacctttacaagctctgccgtgcagtgggtccgacaggcaagaggacaacggctggaatggatcggctggatcgttgtcggcagcggcaacaccaattacgcccagaaattccaagagcgcgtgaccatcaccagggacatgagcacaagcaccgcctacatggaactgagcagcctgagaagcgaggacacagccgtgtattattgcgccgctccttactgtagcggcggcagctgctttgacggctttgacatttggggccagggaaccatggtcacagtgtctagcggtggaagctctggccaggtccagcttgttgaatctggtggcggagtggtgcagccaggcagaagtctgagactgtcttgtgccgcctccggctttaccctgagcagctatggaatgcactgggttcgacaagcccctggcaaaggcctggaatgggttgccgtgatcagctacgacggcagcaacaagtactacgtggactccgtgaagggcagattcaccatcagccgggacaacagcaagaacaccctgtacctgcagatgaactccctgagagccgaagataccgctgtgtactattgtgccagaggctgggcctactgggagctgctgcccgattactattacggcatggacgtgtggggacagggcaccacagttacagtgtcatctgcctctggcggctccggagacaaaactcacacatgcccaccgtgcccagcacctgaactcctggggggaccgtcagtcttcctcttccccccaaaacccaaggacaccctcatgatctcccggacccctgaggtcacatgcgtggtggtggacgtgagccacgaagaccctgaggtcaagttcaactggtacgtggacggcgtggaggtgcataatgccaagacaaagccgcgggaggagcagtacaacagcacgtaccgtgtggtcagcgtcctcaccgtcctgcaccaggactggctgaatggcaaggagtacaagtgcaaggtctccaacaaagccctcccagcccccatcgagaaaaccatctccaaagccaaagggcagccccgagaaccacaggtgtacaccctgcccccatcccgggatgagctgaccaagaaccaggtcagcctgacctgcctggtcaaaggcttctatcccagcgacatcgccgtggagtgggagagcaatgggcagccggagaacaactacaagaccacgcctcccgtgctggactccgacggctccttcttcctctacagcaagctcaccgtggacaagagcaggtggcagcaggggaacgtcttctcatgctccgtgctgcatgaggctctgcacagccactacacgcagaagagcctctccctgtctccgggttgatag

SEQ ID NO: 119 - DNA, 2193 bp, synthetic construct
  misc_feature 1..2193: note = MX180 B1-182   A19-46 - DNA
  source 1..2193: mol_type = other DNA
gagatcgtgctgacacagagccctggcacactgtcactgtctccaggcgaaagagccacactgagctgtagagccagccagagcgtgtccagctcttacctggcttggtatcagcagaagcccggacaggctcccagactgctgatctatggcgcctctagcagagccaccggctttcccgatagattttctggcagcggctccggcaccgacttcaccctgacaatcagcagactggaacccgaggacttcgccgtgtactactgtcagcagtacggcaacagcccctggacatttggccagggcaccaaggtggaaatcagaggcggatctagcggccagaccgtggtcacacaagagcctagctttagcgtgtcccctggcggcacagtgacactgacatgtggactttctagcggatctgtgtccaccgcctactttcccagctggtatcaacagaccccaggccaggcacctcggacactgatctacggcaccaacacaagatccagcggcgtgcccgataggttcagcggatctatcctgggcaacaaggccgcactgactatcacaggcgcccaggccgatgacgagagcgattactactgcgtgctgtacatgggcagaggcatcgtggtttttggcggaggcaccaagctgacagtgcttggaggcggaggatctggcggatctggaagtggtggcggtggatctgcttctggctctggacaggtgcagctggttgaatctggtggcggagttgtgcagcctggcagaagcctgagactgtcttgtgccgcctctggctttaccctgagcagctatggcatgcactgggtccgacaggcccctggcaaaggacttgaatgggtcgccgtgatcagctacgacggcagcaacaagtactacgtggacagcgtgaagggcagattcaccatcagccgggacaacagcaagaacaccctgtacctgcagatgaacagcctgagagccgaggacacagccgtgtattattgcgccagaggctgggcctattgggagctgctgcctgactactactacggcatggatgtgtggggccagggaaccacagtgaccgtgtctagcggcggaagtagcggccaaatgcagctcgttcagagcggccctgaagtgaagaaacctggcacctccgtgaaggtgtcctgcaaggccagcggcttcacctttacaagctctgccgtgcagtgggttcgacaagctagaggccagagactggaatggatcggctggatcgttgtcggcagcggcaacaccaattacgcccagaaattccaagagcgcgtgaccatcaccagagacatgagcaccagcacagcctacatggaactgagcagtctgcgcagcgaagataccgctgtgtactattgtgccgctccttactgtagcggcggcagctgctttgacggctttgacatttggggacagggcacaatggtcaccgtgtcctctgcttccggtggatccggagacaaaactcacacatgcccaccgtgcccagcacctgaactcctggggggaccgtcagtcttcctcttccccccaaaacccaaggacaccctcatgatctcccggacccctgaggtcacatgcgtggtggtggacgtgagccacgaagaccctgaggtcaagttcaactggtacgtggacggcgtggaggtgcataatgccaagacaaagccgcgggaggagcagtacaacagcacgtaccgtgtggtcagcgtcctcaccgtcctgcaccaggactggctgaatggcaaggagtacaagtgcaaggtctccaacaaagccctcccagcccccatcgagaaaaccatctccaaagccaaagggcagccccgagaaccacaggtgtacaccctgcccccatcccgggatgagctgaccaagaaccaggtcagcctgacctgcctggtcaaaggcttctatcccagcgacatcgccgtggagtgggagagcaatgggcagccggagaacaactacaagaccacgcctcccgtgctggactccgacggctccttcttcctctacagcaagctcaccgtggacaagagcaggtggcagcaggggaacgtcttctcatgctccgtgctgcatgaggctctgcacagccactacacgcagaagagcctctccctgtctccgggttgatag

SEQ ID NO: 120 - DNA, 2187 bp, synthetic construct
  misc_feature 1..2187: note = MX183 A19-61   B1-182 - DNA
  source 1..2187: mol_type = other DNA
gacatccagatgacacagagccctagcagcgtgtccgcctctgtgggagacagagtgatcatcacctgtagagccagccagggcatcagctcttggctggcttggtatcagcagaagcctggcaaggcccctaaggtgctgatctacgatgccagctctctgcagtctggcgtgcccagcagattttctggcagcggctacggcaccgacttcaccctgaccatatctagcctgcagcctgaggacagcgccacctactattgtcagcaggccaagtctttccccatcaccttcggccagggcaccagactggaaatcaaaggcggaagcagcggcgagatcgtgctgactcaatctcccggcacactgtctctgagccctggcgaaagagccacactgagctgtagagcttcccagagcgtgtccagcagctacctcgcctggtatcaacaaaagcccggacaggctccccggctgctgatatatggtgcctctagcagagccaccggctttcccgatagattcagcggctctggctctggcacagatttcacactgacaatcagcaggctggaacccgaggacttcgccgtgtattactgccagcagtacggcaacagcccctggacatttggccagggaacaaaggtggaaattagaggcggcggaggctctggcggatctggatctggtggcggaggatctgcttctggaagcggacagatgcagctggtgcagagcggacccgaagtgaagaaacctggcaccagcgtgaaggtgtcctgcaaggccagcggcttcacctttacaagctctgccgtgcagtgggtccgacaggctagaggacaacggctggaatggatcggctggatcgtcgtcggcagcggcaataccaattacgcccagaaattccaagagcgcgtgaccatcaccagagacatgagcaccagcaccgcctacatggaactgtccagcctgagaagcgaggataccgccgtgtactattgcgccgctccttactgtagcggcggcagctgctttgacggctttgacatttggggacagggcacaatggtcacagtgtccagcggcggatcttctggccaggttcagctggttgaatctggcggaggtgttgtgcagcctggcagatccctgagactgtcttgtgccgcctccggctttaccttcagctcctacgccttccactgggttcgacaagcccctggcaaaggcctggaatgggttgccgtgatcagctacgacggcagcaaccagtactacgccgactccgtgaagggcagattcaccatcagccgggacaacagcaagaacaccctgtacctgcagatgaacagcctgcgggccgatgacaccgctgtgtattattgtgcccgcgacctggccattgccgtggctggaacatggcactactacaacggcatggacgtgtggggccaaggcaccacagtgacagtgtctagtgcttctggcggctccggagacaaaactcacacatgcccaccgtgcccagcacctgaactcctggggggaccgtcagtcttcctcttccccccaaaacccaaggacaccctcatgatctcccggacccctgaggtcacatgcgtggtggtggacgtgagccacgaagaccctgaggtcaagttcaactggtacgtggacggcgtggaggtgcataatgccaagacaaagccgcgggaggagcagtacaacagcacgtaccgtgtggtcagcgtcctcaccgtcctgcaccaggactggctgaatggcaaggagtacaagtgcaaggtctccaacaaagccctcccagcccccatcgagaaaaccatctccaaagccaaagggcagccccgagaaccacaggtgtacaccctgcccccatcccgggatgagctgaccaagaaccaggtcagcctgacctgcctggtcaaaggcttctatcccagcgacatcgccgtggagtgggagagcaatgggcagccggagaacaactacaagaccacgcctcccgtgctggactccgacggctccttcttcctctacagcaagctcaccgtggacaagagcaggtggcagcaggggaacgtcttctcatgctccgtgctgcatgaggctctgcacagccactacacgcagaagagcctctccctgtctccgggttgatag

SEQ ID NO: 121 - DNA, 2187 bp, synthetic construct
  misc_feature 1..2187: note = MX184 B1-182   A19-61 - DNA
  source 1..2187: mol_type = other DNA
gagatcgtgctgacacagagccctggcacactgtcactgtctccaggcgaaagagccacactgagctgtagagccagccagagcgtgtccagctcttacctggcttggtatcagcagaagcccggacaggctcccagactgctgatctatggcgcctctagcagagccaccggctttcccgatagattttctggcagcggctccggcaccgacttcaccctgacaatcagcagactggaacccgaggacttcgccgtgtactactgtcagcagtacggcaacagcccctggacatttggccagggcaccaaggtggaaatcagaggcggaagctctggcgacatccagatgacccagtctccaagctccgtgtctgccagcgtgggcgacagagtgatcatcacatgcagagcctctcagggcatcagctcttggctcgcctggtatcaacaaaagcctggcaaggcccctaaggtcctgatctacgatgccagctctctgcagtctggcgtgcccagcagattttccggctctggctacggcacagatttcacactcaccataagcagcctgcagcctgaggacagcgccacctattattgccagcaggccaagtctttccccatcaccttcggccagggaacacgcctcgaaatcaaaggtggcggaggatctggcggctctggaagcggcggaggcggatctgcttctggatctggacaggtgcagctggtggaaagtggcggcggagttgttcagcctggcagaagcctgagactgtcttgtgccgccagcggcttcacctttagcagctacgccttccactgggtccgacaggcacctggcaaaggccttgaatgggtcgccgtgatcagctacgacggcagcaatcagtactacgccgacagcgtgaagggcagattcaccatcagccgggacaacagcaagaacaccctgtacctgcagatgaacagcctgagagccgacgacaccgccgtgtattattgtgcccgcgatctggccattgccgtggccggaacatggcactactacaacggcatggatgtgtggggacagggcacaaccgtgaccgtttctagcggcggatctagcggccagatgcagctcgttcagtctggccccgaagtgaagaaacctggcacctccgtgaaggtgtcctgcaaggcctccggctttaccttcacaagctctgccgtgcagtgggttcgacaagccagaggccaacggctggaatggatcggctggatcgttgtcggcagcggcaacaccaattacgcccagaaattccaagagcgcgtgaccatcaccagagacatgagcaccagcaccgcctacatggaactgtctagcctgcggagcgaggataccgctgtgtactattgcgccgctccttactgtagcggcggcagctgctttgacggctttgacatttggggccaaggcacaatggtcacagtgtcctctgcctctggtggctccggagacaaaactcacacatgcccaccgtgcccagcacctgaactcctggggggaccgtcagtcttcctcttccccccaaaacccaaggacaccctcatgatctcccggacccctgaggtcacatgcgtggtggtggacgtgagccacgaagaccctgaggtcaagttcaactggtacgtggacggcgtggaggtgcataatgccaagacaaagccgcgggaggagcagtacaacagcacgtaccgtgtggtcagcgtcctcaccgtcctgcaccaggactggctgaatggcaaggagtacaagtgcaaggtctccaacaaagccctcccagcccccatcgagaaaaccatctccaaagccaaagggcagccccgagaaccacaggtgtacaccctgcccccatcccgggatgagctgaccaagaaccaggtcagcctgacctgcctggtcaaaggcttctatcccagcgacatcgccgtggagtgggagagcaatgggcagccggagaacaactacaagaccacgcctcccgtgctggactccgacggctccttcttcctctacagcaagctcaccgtggacaagagcaggtggcagcaggggaacgtcttctcatgctccgtgctgcatgaggctctgcacagccactacacgcagaagagcctctccctgtctccgggttgatag

SEQ ID NO: 122 - DNA, 2187 bp, synthetic construct
  misc_feature 1..2187: note = MX326 A23-58   A19-61 - DNA
  source 1..2187: mol_type = other DNA
gagatcgtgctgacacagagccctggcacactgtcactgtctccaggcgaaagagccacactgagctgtagagccagccagagcgtgtccagctcttacctggcttggtatcagcagaagcccggacaggctcccagactgctgatctactctgccagcagcagagccacaggcatccccgatagattttctggcagcggctccggcaccgacttcaccctgacaatcagcagactggaacccgaggacttcgccgtgtacttctgtcagcagtacggcacaagcccctggacatttggccagggcaccaaggtggaaatcaagggcggatcttctggagacatccagatgacacagagccctagcagcgtgtccgcctctgtgggagacagagtgatcatcacctgtagagccagccagggcatcagctcttggctggcttggtatcagcagaagcctggcaaggcccctaaggtgctgatctacgatgccagctctctgcagtctggcgtgcccagcagattttctggcagcggctacggcaccgacttcaccctgaccatatctagcctgcagcctgaggacagcgccacctactattgtcagcaggccaagtctttccccatcaccttcggccagggcaccagactggaaatcaaaggaggcggaggatctggcggatctggttcaggtggcggtggatctgcttctggctctggacaggtccagctcgttgaatcaggtggcggagttgtgcagcctggcagatccctgagactgtcttgtgccgccagcggcttcacctttagcagctacgcctttcactgggttcgccaggcacctggcaaaggccttgaatgggttgccgtgatcagctacgacggcagcaaccagtactacgccgacagcgtgaagggcagattcaccatcagccgggacaacagcaagaacaccctgtacctgcagatgaacagcctgagagccgacgacaccgctgtgtactactgtgctcgcgatctggccattgccgtggccggaacatggcactactacaacggcatggatgtgtggggccaaggcaccaccgtgacagtgtcctctggcggatcttctggacagatgcagctggtgcagtctggccccgaagtgaagaaacctggcaccagcgtgaaggtgtcctgcaaggccagcggcttcacctttacaagctctgccgtgcagtgggtccgacaggctagaggacaacggctggaatggatcggctggatcgttgtcggcagcggcaacaccaattacgcccagaaattccaagagcgcgtgaccatcaccagagacatgagcaccagcaccgcctacatggaactgagcagcctgagaagcgaggacaccgccgtgtactattgcgccgctcctaactgctccaacgtcgtgtgctacgacggcttcgatatctggggccagggcaccatggtcaccgtttcttctgcttctggcggctccggagataagacccacacatgtcctccatgtcctgctccagaactgctcggcggcccttctgtgttcctgtttcctccaaagcctaaggacaccctgatgatcagcagaacccctgaagtgacctgcgtggtggtggatgtgtctcacgaggaccccgaagtgaagttcaattggtacgtggacggcgtggaagtgcacaacgccaagaccaagcctagagaggaacagtacaacagcacctacagagtggtgtccgtgctgaccgtgctgcaccaggattggctgaacggcaaagagtacaagtgcaaggtgtccaacaaggccctgcctgctcctatcgagaaaaccatcagcaaggccaagggccagcctagggaaccccaggtttacacccttcctccaagccgggatgagctgaccaagaaccaggtgtccctgacatgtctcgtgaagggcttctaccccagcgacattgccgtggaatgggagagcaatggccagcctgagaacaactacaagacaacccctcctgtgctggacagcgacggctcattcttcctgtacagcaagctgacagtcgacaagtccagatggcagcagggcaacgtgttcagttgcagcgtgctgcacgaggccctgcacagtcactacacccagaagtccctgagcctgtctcctggatagtga

SEQ ID NO: 123 - DNA, 2187 bp, synthetic construct
  misc_feature 1..2187: note = MX327 A19-61   A23-58 - DNA
  source 1..2187: mol_type = other DNA
gacatccagatgacacagagccctagcagcgtgtccgcctctgtgggagacagagtgatcatcacctgtagagccagccagggcatcagctcttggctggcttggtatcagcagaagcctggcaaggcccctaaggtgctgatctacgatgccagctctctgcagtctggcgtgcccagcagattttctggcagcggctacggcaccgacttcaccctgaccatatctagcctgcagcctgaggacagcgccacctactattgtcagcaggccaagtctttccccatcaccttcggccagggcaccagactggaaatcaaaggcggatcttctggagagatcgtgctgacacagagccctggcacactgtcactgtctccaggcgaaagagccacactgagctgtagagccagccagagcgtgtccagctcttacctggcttggtatcagcagaagcccggacaggctcccagactgctgatctactctgccagcagcagagccacaggcatccccgatagattttctggcagcggctccggcaccgacttcaccctgacaatcagcagactggaacccgaggacttcgccgtgtacttctgtcagcagtacggcacaagcccctggacatttggccagggcaccaaggtggaaatcaagggaggcggaggatctggcggatctggttcaggtggcggtggatctgcttctggctctggacagatgcagctggtgcagtctggccccgaagtgaagaaacctggcaccagcgtgaaggtgtcctgcaaggccagcggcttcacctttacaagctctgccgtgcagtgggtccgacaggctagaggacaacggctggaatggatcggctggatcgttgtcggcagcggcaacaccaattacgcccagaaattccaagagcgcgtgaccatcaccagagacatgagcaccagcaccgcctacatggaactgagcagcctgagaagcgaggacaccgccgtgtactattgcgccgctcctaactgctccaacgtcgtgtgctacgacggcttcgatatctggggccagggcaccatggtcaccgtttcttctggcggatcttctggacaggtccagctcgttgaatcaggtggcggagttgtgcagcctggcagatccctgagactgtcttgtgccgccagcggcttcacctttagcagctacgcctttcactgggttcgccaggcacctggcaaaggccttgaatgggttgccgtgatcagctacgacggcagcaaccagtactacgccgacagcgtgaagggcagattcaccatcagccgggacaacagcaagaacaccctgtacctgcagatgaacagcctgagagccgacgacaccgctgtgtactactgtgctcgcgatctggccattgccgtggccggaacatggcactactacaacggcatggatgtgtggggccaaggcaccaccgtgacagtgtcctctgcttctggcggctccggagataagacccacacatgtcctccatgtcctgctccagaactgctcggcggcccttctgtgttcctgtttcctccaaagcctaaggacaccctgatgatcagcagaacccctgaagtgacctgcgtggtggtggatgtgtctcacgaggaccccgaagtgaagttcaattggtacgtggacggcgtggaagtgcacaacgccaagaccaagcctagagaggaacagtacaacagcacctacagagtggtgtccgtgctgaccgtgctgcaccaggattggctgaacggcaaagagtacaagtgcaaggtgtccaacaaggccctgcctgctcctatcgagaaaaccatcagcaaggccaagggccagcctagggaaccccaggtttacacccttcctccaagccgggatgagctgaccaagaaccaggtgtccctgacatgtctcgtgaagggcttctaccccagcgacattgccgtggaatgggagagcaatggccagcctgagaacaactacaagacaacccctcctgtgctggacagcgacggctcattcttcctgtacagcaagctgacagtcgacaagtccagatggcagcagggcaacgtgttcagttgcagcgtgctgcacgaggccctgcacagtcactacacccagaagtccctgagcctgtctcctggatagtga

SEQ ID NO: 124 - DNA, 2856 bp, synthetic construct
  misc_feature 1..2856: note = MX366 A19-61   B1-182 CL-CH1 - DNA
  source 1..2856: mol_type = other DNA
gacatccagatgacacagagccctagcagcgtgtccgcctctgtgggagacagagtgatcatcacctgtagagccagccagggcatcagctcttggctggcttggtatcagcagaagcctggcaaggcccctaaggtgctgatctacgatgccagctctctgcagtctggcgtgcccagcagattttctggcagcggctacggcaccgacttcaccctgaccatatctagcctgcagcctgaggacagcgccacctactattgtcagcaggccaagtctttccccatcaccttcggccagggcaccagactggaaatcaaaggcggaagcagcggcgagatcgtgctgactcaatctcccggcacactgtctctgagccctggcgaaagagccacactgagctgtagagcttcccagagcgtgtccagcagctacctcgcctggtatcaacaaaagcccggacaggctccccggctgctgatatatggtgcctctagcagagccaccggctttcccgatagattcagcggctctggctctggcacagatttcacactgacaatcagcaggctggaacccgaggacttcgccgtgtattactgccagcagtacggcaacagcccctggacatttggccagggaacaaaggtggaaattagaggcggcggaggctctggcggatctggatctggtggcggaggatctgcttctggaagcggacagatgcagctggtgcagagcggacccgaagtgaagaaacctggcaccagcgtgaaggtgtcctgcaaggccagcggcttcacctttacaagctctgccgtgcagtgggtccgacaggctagaggacaacggctggaatggatcggctggatcgtcgtcggcagcggcaataccaattacgcccagaaattccaagagcgcgtgaccatcaccagagacatgagcaccagcaccgcctacatggaactgtccagcctgagaagcgaggataccgccgtgtactattgcgccgctccttactgtagcggcggcagctgctttgacggctttgacatttggggacagggcacaatggtcacagtgtccagcggcggatcttctggccaggttcagctggttgaatctggcggaggtgttgtgcagcctggcagatccctgagactgtcttgtgccgcctccggctttaccttcagctcctacgccttccactgggttcgacaagcccctggcaaaggcctggaatgggttgccgtgatcagctacgacggcagcaaccagtactacgccgactccgtgaagggcagattcaccatcagccgggacaacagcaagaacaccctgtacctgcagatgaacagcctgcgggccgatgacaccgctgtgtattattgtgcccgcgacctggccattgccgtggctggaacatggcactactacaacggcatggacgtgtggggccaaggcaccacagtgacagtgtctagtcgtacggtggccgctcccagcgtgttcatcttcccacctagcgacgagcagctgaagtccggcacagcctctgtcgtgtgcctgctgaacaacttctacccccgcgaggccaaagtgcagtggaaggtggacaacgccctgcagagcggcaacagccaggaaagcgtgaccgagcaggacagcaaggactccacctacagcctgagcagcaccctgacactgagcaaggccgactacgagaagcacaaggtgtacgcctgcgaagtgacccaccagggcctgtctagccccgtgaccaagagcttcaaccggggcgagtgtggtggcggaggtagcggaggcagcggcagcggaggaggcgggagcgccagcggcagcggagcttcgaccaagggcccatcggtcttccccctggcaccctcctccaagagcacctctgggggcacagcggccctgggctgcctggtcaaggactacttccccgaacccgtgacggtgtcgtggaactcaggcgccctgaccagcggcgtgcacaccttcccggctgtcctacagtcctcaggactctactccctcagcagcgtggtgaccgtgccctccagcagcttgggcacccagacctacatctgcaacgtgaatcacaagcccagcaacaccaaggtggacaagaaagttgagcccaaatcttgtgacaaaactcacacatgcccaccgtgcccagcacctgaactcctggggggaccgtcagtcttcctcttccccccaaaacccaaggacaccctcatgatctcccggacccctgaggtcacatgcgtggtggtggacgtgagccacgaagaccctgaggtcaagttcaactggtacgtggacggcgtggaggtgcataatgccaagacaaagccgcgggaggagcagtacaacagcacgtaccgtgtggtcagcgtcctcaccgtcctgcaccaggactggctgaatggcaaggagtacaagtgcaaggtctccaacaaagccctcccagcccccatcgagaaaaccatctccaaagccaaagggcagccccgagaaccacaggtgtacaccctgcccccatcccgggatgagctgaccaagaaccaggtcagcctgacctgcctggtcaaaggcttctatcccagcgacatcgccgtggagtgggagagcaatgggcagccggagaacaactacaagaccacgcctcccgtgctggactccgacggctccttcttcctctacagcaagctcaccgtggacaagagcaggtggcagcaggggaacgtcttctcatgctccgtgctgcatgaggctctgcacagccactacacgcagaagagcctctccctgtctccgggttga

SEQ ID NO: 125 - DNA, 2856 bp, synthetic construct
  misc_feature 1..2856: note = MX367 B1-182   A19-61 CL-CH1 - DNA
  source 1..2856: mol_type = other DNA
gagatcgtgctgacacagagccctggcacactgtcactgtctccaggcgaaagagccacactgagctgtagagccagccagagcgtgtccagctcttacctggcttggtatcagcagaagcccggacaggctcccagactgctgatctatggcgcctctagcagagccaccggctttcccgatagattttctggcagcggctccggcaccgacttcaccctgacaatcagcagactggaacccgaggacttcgccgtgtactactgtcagcagtacggcaacagcccctggacatttggccagggcaccaaggtggaaatcagaggcggaagctctggcgacatccagatgacccagtctccaagctccgtgtctgccagcgtgggcgacagagtgatcatcacatgcagagcctctcagggcatcagctcttggctcgcctggtatcaacaaaagcctggcaaggcccctaaggtcctgatctacgatgccagctctctgcagtctggcgtgcccagcagattttccggctctggctacggcacagatttcacactcaccataagcagcctgcagcctgaggacagcgccacctattattgccagcaggccaagtctttccccatcaccttcggccagggaacacgcctcgaaatcaaaggtggcggaggatctggcggctctggaagcggcggaggcggatctgcttctggatctggacaggtgcagctggtggaaagtggcggcggagttgttcagcctggcagaagcctgagactgtcttgtgccgccagcggcttcacctttagcagctacgccttccactgggtccgacaggcacctggcaaaggccttgaatgggtcgccgtgatcagctacgacggcagcaatcagtactacgccgacagcgtgaagggcagattcaccatcagccgggacaacagcaagaacaccctgtacctgcagatgaacagcctgagagccgacgacaccgccgtgtattattgtgcccgcgatctggccattgccgtggccggaacatggcactactacaacggcatggatgtgtggggacagggcacaaccgtgaccgtttctagcggcggatctagcggccagatgcagctcgttcagtctggccccgaagtgaagaaacctggcacctccgtgaaggtgtcctgcaaggcctccggctttaccttcacaagctctgccgtgcagtgggttcgacaagccagaggccaacggctggaatggatcggctggatcgttgtcggcagcggcaacaccaattacgcccagaaattccaagagcgcgtgaccatcaccagagacatgagcaccagcaccgcctacatggaactgtctagcctgcggagcgaggataccgctgtgtactattgcgccgctccttactgtagcggcggcagctgctttgacggctttgacatttggggccaaggcacaatggtcacagtgtcctctcgtacggtggccgctcccagcgtgttcatcttcccacctagcgacgagcagctgaagtccggcacagcctctgtcgtgtgcctgctgaacaacttctacccccgcgaggccaaagtgcagtggaaggtggacaacgccctgcagagcggcaacagccaggaaagcgtgaccgagcaggacagcaaggactccacctacagcctgagcagcaccctgacactgagcaaggccgactacgagaagcacaaggtgtacgcctgcgaagtgacccaccagggcctgtctagccccgtgaccaagagcttcaaccggggcgagtgtggtggcggaggtagcggaggcagcggcagcggaggaggcgggagcgccagcggcagcggagcttcgaccaagggcccatcggtcttccccctggcaccctcctccaagagcacctctgggggcacagcggccctgggctgcctggtcaaggactacttccccgaacccgtgacggtgtcgtggaactcaggcgccctgaccagcggcgtgcacaccttcccggctgtcctacagtcctcaggactctactccctcagcagcgtggtgaccgtgccctccagcagcttgggcacccagacctacatctgcaacgtgaatcacaagcccagcaacaccaaggtggacaagaaagttgagcccaaatcttgtgacaaaactcacacatgcccaccgtgcccagcacctgaactcctggggggaccgtcagtcttcctcttccccccaaaacccaaggacaccctcatgatctcccggacccctgaggtcacatgcgtggtggtggacgtgagccacgaagaccctgaggtcaagttcaactggtacgtggacggcgtggaggtgcataatgccaagacaaagccgcgggaggagcagtacaacagcacgtaccgtgtggtcagcgtcctcaccgtcctgcaccaggactggctgaatggcaaggagtacaagtgcaaggtctccaacaaagccctcccagcccccatcgagaaaaccatctccaaagccaaagggcagccccgagaaccacaggtgtacaccctgcccccatcccgggatgagctgaccaagaaccaggtcagcctgacctgcctggtcaaaggcttctatcccagcgacatcgccgtggagtgggagagcaatgggcagccggagaacaactacaagaccacgcctcccgtgctggactccgacggctccttcttcctctacagcaagctcaccgtggacaagagcaggtggcagcaggggaacgtcttctcatgctccgtgctgcatgaggctctgcacagccactacacgcagaagagcctctccctgtctccgggttga

SEQ ID NO: 126 - DNA, 2187 bp, synthetic construct
  misc_feature 1..2187: note = MX412 A23-58H/B1-182L   A19-61 - DNA
  source 1..2187: mol_type = other DNA
gaaattgtgctgacccagtctccagggactctgagccttagtcctggcgagagagctaccctgtcttgcagagcctctcagtccgtgtcctctagctatctcgcctggtatcaacaaaagcctgggcaagcccctcggctgctgatatacggtgctagcagcagagctacaggcttccctgacaggtttagcggctctggaagcggcacagatttcacactgaccatctctcggctggaacctgaagattttgccgtctattattgccagcagtatgggaactccccttggaccttcggacagggaacaaaggtcgagattagaggcggaagctctggcgacatccagatgacacagagccctagcagcgtgtccgcctctgtgggagacagagtgatcatcacctgtagagccagccagggcatcagctcttggctggcttggtatcagcagaagcctggcaaggcccctaaggtgctgatctacgatgccagctctctgcagtctggcgtgcccagcagattttctggcagcggctacggcaccgacttcaccctgaccatatctagcctgcagcctgaggacagcgccacctactattgtcagcaggccaagtctttccccatcaccttcggccagggcaccagactggaaatcaaaggcggcggaggaagcggcggatctggatctggtggcggaggatctgcttctggctctggacaggttcagctggttgaatctggcggaggtgttgtgcagcctggcagatccctgagactgtcttgtgccgcctccggctttaccttcagctcctacgccttccactgggttcgacaagcccctggcaaaggcctggaatgggttgccgtgatcagctacgacggcagcaaccagtactacgccgactccgtgaagggcagattcaccatcagccgggacaacagcaagaacaccctgtacctgcagatgaacagcctgcgggccgatgacaccgctgtgtattattgtgcccgcgacctggccattgccgtggctggaacatggcactactacaacggcatggacgtgtggggccaaggcaccacagtgacagtgtctagtggcggatctagcggccagatgcagctggtgcagtctggccccgaagtgaagaaacctggcaccagcgtgaaggtgtcctgcaaggccagcggcttcacctttacaagctctgccgtgcagtgggtccgacaggcaagaggacaacggctggaatggatcggctggatcgttgtcggcagcggcaacaccaattacgcccagaaattccaagagcgcgtgaccatcaccagagacatgagcaccagcaccgcctacatggaactgagcagcctgagaagcgaggacacagcagtgtactattgcgccgctcctaactgctccaacgtcgtgtgctacgacggcttcgatatctggggccagggaaccatggtcaccgtgtcaagtgcttctggcggctccggagataagacccacacatgtcctccatgtcctgctccagaactgctcggcggcccttctgtgttcctgtttcctccaaagcctaaggacaccctgatgatcagcagaacccctgaagtgacctgcgtggtggtggatgtgtctcacgaggaccccgaagtgaagttcaattggtacgtggacggcgtggaagtgcacaacgccaagaccaagcctagagaggaacagtacaacagcacctacagagtggtgtccgtgctgaccgtgctgcaccaggattggctgaacggcaaagagtacaagtgcaaggtgtccaacaaggccctgcctgctcctatcgagaaaaccatcagcaaggccaagggccagcctagggaaccccaggtttacacccttcctccaagccgggatgagctgaccaagaaccaggtgtccctgacatgtctcgtgaagggcttctaccccagcgacattgccgtggaatgggagagcaatggccagcctgagaacaactacaagacaacccctcctgtgctggacagcgacggctcattcttcctgtacagcaagctgacagtcgacaagtccagatggcagcagggcaacgtgttcagttgcagcgtgctgcacgaggccctgcacagtcactacacccagaagtccctgagcctgtctcctggatagtga

SEQ ID NO: 127 - DNA, 2187 bp, synthetic construct
  misc_feature 1..2187: note = MX413 A19-61   A23-58H/B1-182L - DNA
  source 1..2187: mol_type = other DNA
gacatccagatgacacagagccctagcagcgtgtccgcctctgtgggagacagagtgatcatcacctgtagagccagccagggcatcagctcttggctggcttggtatcagcagaagcctggcaaggcccctaaggtgctgatctacgatgccagctctctgcagtctggcgtgcccagcagattttctggcagcggctacggcaccgacttcaccctgaccatatctagcctgcagcctgaggacagcgccacctactattgtcagcaggccaagtctttccccatcaccttcggccagggcaccagactggaaatcaaaggcggaagctctggcgaaattgtgctgacccagtctccagggactctgagccttagtcctggcgagagagctaccctgtcttgcagagcctctcagtccgtgtcctctagctatctcgcctggtatcaacaaaagcctgggcaagcccctcggctgctgatatacggtgctagcagcagagctacaggcttccctgacaggtttagcggctctggaagcggcacagatttcacactgaccatctctcggctggaacctgaagattttgccgtctattattgccagcagtatgggaactccccttggaccttcggacagggaacaaaggtcgagattagaggcggcggaggaagcggcggatctggatctggtggcggaggatctgcttctggctctggacagatgcagctggtgcagtctggccccgaagtgaagaaacctggcaccagcgtgaaggtgtcctgcaaggccagcggcttcacctttacaagctctgccgtgcagtgggtccgacaggcaagaggacaacggctggaatggatcggctggatcgttgtcggcagcggcaacaccaattacgcccagaaattccaagagcgcgtgaccatcaccagagacatgagcaccagcaccgcctacatggaactgagcagcctgagaagcgaggacacagcagtgtactattgcgccgctcctaactgctccaacgtcgtgtgctacgacggcttcgatatctggggccagggaaccatggtcaccgtgtcaagtggcggatctagcggccaggttcagctggttgaatctggcggaggtgttgtgcagcctggcagatccctgagactgtcttgtgccgcctccggctttaccttcagctcctacgccttccactgggttcgacaagcccctggcaaaggcctggaatgggttgccgtgatcagctacgacggcagcaaccagtactacgccgactccgtgaagggcagattcaccatcagccgggacaacagcaagaacaccctgtacctgcagatgaacagcctgcgggccgatgacaccgctgtgtattattgtgcccgcgacctggccattgccgtggctggaacatggcactactacaacggcatggacgtgtggggccaaggcaccacagtgacagtgtctagtgcttctggcggctccggagataagacccacacatgtcctccatgtcctgctccagaactgctcggcggcccttctgtgttcctgtttcctccaaagcctaaggacaccctgatgatcagcagaacccctgaagtgacctgcgtggtggtggatgtgtctcacgaggaccccgaagtgaagttcaattggtacgtggacggcgtggaagtgcacaacgccaagaccaagcctagagaggaacagtacaacagcacctacagagtggtgtccgtgctgaccgtgctgcaccaggattggctgaacggcaaagagtacaagtgcaaggtgtccaacaaggccctgcctgctcctatcgagaaaaccatcagcaaggccaagggccagcctagggaaccccaggtttacacccttcctccaagccgggatgagctgaccaagaaccaggtgtccctgacatgtctcgtgaagggcttctaccccagcgacattgccgtggaatgggagagcaatggccagcctgagaacaactacaagacaacccctcctgtgctggacagcgacggctcattcttcctgtacagcaagctgacagtcgacaagtccagatggcagcagggcaacgtgttcagttgcagcgtgctgcacgaggccctgcacagtcactacacccagaagtccctgagcctgtctcctggatagtga

SEQ ID NO: 128 - DNA, 2856 bp, synthetic construct
  misc_feature 1..2856: note = MX467 A23-58H/B1-182L   A19-61 CL-CH1 - DNA
  source 1..2856: mol_type = other DNA
gaaattgtgctgacccagtctccagggactctgagccttagtcctggcgagagagctaccctgtcttgcagagcctctcagtccgtgtcctctagctatctcgcctggtatcaacaaaagcctgggcaagcccctcggctgctgatatacggtgctagcagcagagctacaggcttccctgacaggtttagcggctctggaagcggcacagatttcacactgaccatctctcggctggaacctgaagattttgccgtctattattgccagcagtatgggaactccccttggaccttcggacagggaacaaaggtcgagattagaggcggaagctctggcgacatccagatgacacagagccctagcagcgtgtccgcctctgtgggagacagagtgatcatcacctgtagagccagccagggcatcagctcttggctggcttggtatcagcagaagcctggcaaggcccctaaggtgctgatctacgatgccagctctctgcagtctggcgtgcccagcagattttctggcagcggctacggcaccgacttcaccctgaccatatctagcctgcagcctgaggacagcgccacctactattgtcagcaggccaagtctttccccatcaccttcggccagggcaccagactggaaatcaaaggcggcggaggaagcggcggatctggatctggtggcggaggatctgcttctggctctggacaggttcagctggttgaatctggcggaggtgttgtgcagcctggcagatccctgagactgtcttgtgccgcctccggctttaccttcagctcctacgccttccactgggttcgacaagcccctggcaaaggcctggaatgggttgccgtgatcagctacgacggcagcaaccagtactacgccgactccgtgaagggcagattcaccatcagccgggacaacagcaagaacaccctgtacctgcagatgaacagcctgcgggccgatgacaccgctgtgtattattgtgcccgcgacctggccattgccgtggctggaacatggcactactacaacggcatggacgtgtggggccaaggcaccacagtgacagtgtctagtggcggatctagcggccagatgcagctggtgcagtctggccccgaagtgaagaaacctggcaccagcgtgaaggtgtcctgcaaggccagcggcttcacctttacaagctctgccgtgcagtgggtccgacaggcaagaggacaacggctggaatggatcggctggatcgttgtcggcagcggcaacaccaattacgcccagaaattccaagagcgcgtgaccatcaccagagacatgagcaccagcaccgcctacatggaactgagcagcctgagaagcgaggacacagcagtgtactattgcgccgctcctaactgctccaacgtcgtgtgctacgacggcttcgatatctggggccagggaaccatggtcaccgtgtcaagtcgtacggtggccgctcccagcgtgttcatcttcccacctagcgacgagcagctgaagtccggcacagcctctgtcgtgtgcctgctgaacaacttctacccccgcgaggccaaagtgcagtggaaggtggacaacgccctgcagagcggcaacagccaggaaagcgtgaccgagcaggacagcaaggactccacctacagcctgagcagcaccctgacactgagcaaggccgactacgagaagcacaaggtgtacgcctgcgaagtgacccaccagggcctgtctagccccgtgaccaagagcttcaaccggggcgagtgtggtggcggaggtagcggaggcagcggcagcggaggaggcgggagcgccagcggcagcggagcttcgaccaagggcccatcggtcttccccctggcaccctcctccaagagcacctctgggggcacagcggccctgggctgcctggtcaaggactacttccccgaacccgtgacggtgtcgtggaactcaggcgccctgaccagcggcgtgcacaccttcccggctgtcctacagtcctcaggactctactccctcagcagcgtggtgaccgtgccctccagcagcttgggcacccagacctacatctgcaacgtgaatcacaagcccagcaacaccaaggtggacaagaaagttgagcccaaatcttgtgacaaaactcacacatgcccaccgtgcccagcacctgaactcctggggggaccgtcagtcttcctcttccccccaaaacccaaggacaccctcatgatctcccggacccctgaggtcacatgcgtggtggtggacgtgagccacgaagaccctgaggtcaagttcaactggtacgtggacggcgtggaggtgcataatgccaagacaaagccgcgggaggagcagtacaacagcacgtaccgtgtggtcagcgtcctcaccgtcctgcaccaggactggctgaatggcaaggagtacaagtgcaaggtctccaacaaagccctcccagcccccatcgagaaaaccatctccaaagccaaagggcagccccgagaaccacaggtgtacaccctgcccccatcccgggatgagctgaccaagaaccaggtcagcctgacctgcctggtcaaaggcttctatcccagcgacatcgccgtggagtgggagagcaatgggcagccggagaacaactacaagaccacgcctcccgtgctggactccgacggctccttcttcctctacagcaagctcaccgtggacaagagcaggtggcagcaggggaacgtcttctcatgctccgtgctgcatgaggctctgcacagccactacacgcagaagagcctctccctgtctccgggttga

SEQ ID NO: 129 - DNA, 2856 bp, synthetic construct
  misc_feature 1..2856: note = MX468 A19-61   A23-58H/B1-182L CL-CH1 - DNA
  source 1..2856: mol_type = other DNA
gacatccagatgacacagagccctagcagcgtgtccgcctctgtgggagacagagtgatcatcacctgtagagccagccagggcatcagctcttggctggcttggtatcagcagaagcctggcaaggcccctaaggtgctgatctacgatgccagctctctgcagtctggcgtgcccagcagattttctggcagcggctacggcaccgacttcaccctgaccatatctagcctgcagcctgaggacagcgccacctactattgtcagcaggccaagtctttccccatcaccttcggccagggcaccagactggaaatcaaaggcggaagctctggcgaaattgtgctgacccagtctccagggactctgagccttagtcctggcgagagagctaccctgtcttgcagagcctctcagtccgtgtcctctagctatctcgcctggtatcaacaaaagcctgggcaagcccctcggctgctgatatacggtgctagcagcagagctacaggcttccctgacaggtttagcggctctggaagcggcacagatttcacactgaccatctctcggctggaacctgaagattttgccgtctattattgccagcagtatgggaactccccttggaccttcggacagggaacaaaggtcgagattagaggcggcggaggaagcggcggatctggatctggtggcggaggatctgcttctggctctggacagatgcagctggtgcagtctggccccgaagtgaagaaacctggcaccagcgtgaaggtgtcctgcaaggccagcggcttcacctttacaagctctgccgtgcagtgggtccgacaggcaagaggacaacggctggaatggatcggctggatcgttgtcggcagcggcaacaccaattacgcccagaaattccaagagcgcgtgaccatcaccagagacatgagcaccagcaccgcctacatggaactgagcagcctgagaagcgaggacacagcagtgtactattgcgccgctcctaactgctccaacgtcgtgtgctacgacggcttcgatatctggggccagggaaccatggtcaccgtgtcaagtggcggatctagcggccaggttcagctggttgaatctggcggaggtgttgtgcagcctggcagatccctgagactgtcttgtgccgcctccggctttaccttcagctcctacgccttccactgggttcgacaagcccctggcaaaggcctggaatgggttgccgtgatcagctacgacggcagcaaccagtactacgccgactccgtgaagggcagattcaccatcagccgggacaacagcaagaacaccctgtacctgcagatgaacagcctgcgggccgatgacaccgctgtgtattattgtgcccgcgacctggccattgccgtggctggaacatggcactactacaacggcatggacgtgtggggccaaggcaccacagtgacagtgtctagtcgtacggtggccgctcccagcgtgttcatcttcccacctagcgacgagcagctgaagtccggcacagcctctgtcgtgtgcctgctgaacaacttctacccccgcgaggccaaagtgcagtggaaggtggacaacgccctgcagagcggcaacagccaggaaagcgtgaccgagcaggacagcaaggactccacctacagcctgagcagcaccctgacactgagcaaggccgactacgagaagcacaaggtgtacgcctgcgaagtgacccaccagggcctgtctagccccgtgaccaagagcttcaaccggggcgagtgtggtggcggaggtagcggaggcagcggcagcggaggaggcgggagcgccagcggcagcggagcttcgaccaagggcccatcggtcttccccctggcaccctcctccaagagcacctctgggggcacagcggccctgggctgcctggtcaaggactacttccccgaacccgtgacggtgtcgtggaactcaggcgccctgaccagcggcgtgcacaccttcccggctgtcctacagtcctcaggactctactccctcagcagcgtggtgaccgtgccctccagcagcttgggcacccagacctacatctgcaacgtgaatcacaagcccagcaacaccaaggtggacaagaaagttgagcccaaatcttgtgacaaaactcacacatgcccaccgtgcccagcacctgaactcctggggggaccgtcagtcttcctcttccccccaaaacccaaggacaccctcatgatctcccggacccctgaggtcacatgcgtggtggtggacgtgagccacgaagaccctgaggtcaagttcaactggtacgtggacggcgtggaggtgcataatgccaagacaaagccgcgggaggagcagtacaacagcacgtaccgtgtggtcagcgtcctcaccgtcctgcaccaggactggctgaatggcaaggagtacaagtgcaaggtctccaacaaagccctcccagcccccatcgagaaaaccatctccaaagccaaagggcagccccgagaaccacaggtgtacaccctgcccccatcccgggatgagctgaccaagaaccaggtcagcctgacctgcctggtcaaaggcttctatcccagcgacatcgccgtggagtgggagagcaatgggcagccggagaacaactacaagaccacgcctcccgtgctggactccgacggctccttcttcctctacagcaagctcaccgtggacaagagcaggtggcagcaggggaacgtcttctcatgctccgtgctgcatgaggctctgcacagccactacacgcagaagagcctctccctgtctccgggttga

SEQ ID NO: 130 - DNA, 2193 bp, synthetic construct
  misc_feature 1..2193: note = MX490 A23-58H/B1-182L   A19-46 - DNA
  source 1..2193: mol_type = other DNA
gagatcgtgctgacacagagccctggcacactgtcactgtctccaggcgaaagagccacactgagctgtagagccagccagagcgtgtccagctcttacctggcttggtatcagcagaagcccggacaggctcccagactgctgatctatggcgcctctagcagagccaccggctttcccgatagattttctggcagcggctccggcaccgacttcaccctgacaatcagcagactggaacccgaggacttcgccgtgtactactgtcagcagtacggcaacagcccctggacatttggccagggcaccaaggtggaaatcagaggcggatctagcggccagaccgtggtcacacaagagcctagctttagcgtgtcccctggcggcacagtgacactgacatgtggactttctagcggatctgtgtccaccgcctactttcccagctggtatcaacagaccccaggccaggcacctcggacactgatctacggcaccaacacaagatccagcggcgtgcccgataggttcagcggatctatcctgggcaacaaggccgcactgactatcacaggcgcccaggccgatgacgagagcgattactactgcgtgctgtacatgggcagaggcatcgtggtttttggcggaggcaccaagctgacagtgcttggaggcggaggatctggcggatctggaagtggtggcggtggatctgcttctggctctggacaggtgcagctggttgaatctggtggcggagttgtgcagcctggcagaagcctgagactgtcttgtgccgcctctggctttaccctgagcagctatggcatgcactgggtccgacaggcccctggcaaaggacttgaatgggtcgccgtgatcagctacgacggcagcaacaagtactacgtggacagcgtgaagggcagattcaccatcagccgggacaacagcaagaacaccctgtacctgcagatgaacagcctgagagccgaggacacagccgtgtattattgcgccagaggctgggcctattgggagctgctgcctgactactactacggcatggatgtgtggggccagggaaccacagtgaccgtgtctagcggcggaagtagcggccaaatgcagctcgttcagagcggccctgaagtgaagaaacctggcacctccgtgaaggtgtcctgcaaggccagcggcttcacctttacaagctctgccgtgcagtgggttcgacaagctagaggccagagactggaatggatcggctggatcgttgtcggcagcggcaacaccaattacgcccagaaattccaagagcgcgtgaccatcaccagagacatgagcaccagcacagcctacatggaactgagcagtctgcgcagcgaagataccgctgtgtactattgtgccgctcctaactgcagcaacgtcgtgtgctacgatggcttcgacatctggggacagggcacaatggtcaccgtgtcctctgcttctggcggctccggagataagacccacacatgtcctccatgtcctgctccagaactgctcggcggcccttctgtgttcctgtttcctccaaagcctaaggacaccctgatgatcagcagaacccctgaagtgacctgcgtggtggtggatgtgtctcacgaggaccccgaagtgaagttcaattggtacgtggacggcgtggaagtgcacaacgccaagaccaagcctagagaggaacagtacaacagcacctacagagtggtgtccgtgctgaccgtgctgcaccaggattggctgaacggcaaagagtacaagtgcaaggtgtccaacaaggccctgcctgctcctatcgagaaaaccatcagcaaggccaagggccagcctagggaaccccaggtttacacccttcctccaagccgggatgagctgaccaagaaccaggtgtccctgacatgtctcgtgaagggcttctaccccagcgacattgccgtggaatgggagagcaatggccagcctgagaacaactacaagacaacccctcctgtgctggacagcgacggctcattcttcctgtacagcaagctgacagtcgacaagtccagatggcagcagggcaacgtgttcagttgcagcgtgctgcacgaggccctgcacagtcactacacccagaagtccctgagcctgtctcctggatagtga

SEQ ID NO: 131 - DNA, 2865 bp, synthetic construct
  misc_feature 1..2865: note = MX491 A23-58H/B1-182L   A19-46 CL-CH1 - DNA
  source 1..2865: mol_type = other DNA
gagatcgtgctgacacagagccctggcacactgtcactgtctccaggcgaaagagccacactgagctgtagagccagccagagcgtgtccagctcttacctggcttggtatcagcagaagcccggacaggctcccagactgctgatctatggcgcctctagcagagccaccggctttcccgatagattttctggcagcggctccggcaccgacttcaccctgacaatcagcagactggaacccgaggacttcgccgtgtactactgtcagcagtacggcaacagcccctggacatttggccagggcaccaaggtggaaatcagaggcggatctagcggccagaccgtggtcacacaagagcctagctttagcgtgtcccctggcggcacagtgacactgacatgtggactttctagcggatctgtgtccaccgcctactttcccagctggtatcaacagaccccaggccaggcacctcggacactgatctacggcaccaacacaagatccagcggcgtgcccgataggttcagcggatctatcctgggcaacaaggccgcactgactatcacaggcgcccaggccgatgacgagagcgattactactgcgtgctgtacatgggcagaggcatcgtggtttttggcggaggcaccaagctgacagtgcttggaggcggaggatctggcggatctggaagtggtggcggtggatctgcttctggctctggacaggtgcagctggttgaatctggtggcggagttgtgcagcctggcagaagcctgagactgtcttgtgccgcctctggctttaccctgagcagctatggcatgcactgggtccgacaggcccctggcaaaggacttgaatgggtcgccgtgatcagctacgacggcagcaacaagtactacgtggacagcgtgaagggcagattcaccatcagccgggacaacagcaagaacaccctgtacctgcagatgaacagcctgagagccgaggacacagccgtgtattattgcgccagaggctgggcctattgggagctgctgcctgactactactacggcatggatgtgtggggccagggaaccacagtgaccgtgtctagcggcggaagtagcggccaaatgcagctcgttcagagcggccctgaagtgaagaaacctggcacctccgtgaaggtgtcctgcaaggccagcggcttcacctttacaagctctgccgtgcagtgggttcgacaagctagaggccagagactggaatggatcggctggatcgttgtcggcagcggcaacaccaattacgcccagaaattccaagagcgcgtgaccatcaccagagacatgagcaccagcacagcctacatggaactgagcagtctgcgcagcgaagataccgctgtgtactattgtgccgctcctaactgcagcaacgtcgtgtgctacgatggcttcgacatctggggacagggcacaatggtcaccgtgtcctctcgtacggtggccgctcccagcgtgttcatcttcccacctagcgacgagcagctgaagtccggcacagcctctgtcgtgtgcctgctgaacaacttctacccccgcgaggccaaagtgcagtggaaggtggacaacgccctgcagagcggcaacagccaggaaagcgtgaccgagcaggacagcaaggactccacctacagcctgagcagcaccctgacactgagcaaggccgactacgagaagcacaaggtgtacgcctgcgaagtgacccaccagggcctgtctagccccgtgaccaagagcttcaaccggggcgagtgtggtggcggaggtagcggaggcagcggcagcggaggaggcgggagcgccagcggcagcggagcttcgaccaagggcccatccgtgtttcctctggctcccagcagcaagtctacaagcggaggaacagccgctctgggctgcctggtcaaggattactttcccgagcctgtgaccgtgtcctggaattctggcgctctgacaagcggcgtgcacacctttccagctgtgctgcaaagcagcggcctgtactctctgagcagcgtggtcacagtgcctagctctagcctgggcacccagacctacatctgcaatgtgaaccacaagcctagcaacaccaaggtggacaagaaggtggaacccaagagctgcgataagacccacacatgtcctccatgtcctgctccagaactgctcggcggcccttctgtgttcctgtttcctccaaagcctaaggacaccctgatgatcagcagaacccctgaagtgacctgcgtggtggtggatgtgtctcacgaggaccccgaagtgaagttcaattggtacgtggacggcgtggaagtgcacaacgccaagaccaagcctagagaggaacagtacaacagcacctacagagtggtgtccgtgctgaccgtgctgcaccaggattggctgaacggcaaagagtacaagtgcaaggtgtccaacaaggccctgcctgctcctatcgagaaaaccatcagcaaggccaagggccagcctagggaaccccaggtttacacccttcctccaagccgggatgagctgaccaagaaccaggtgtccctgacatgtctcgtgaagggcttctaccccagcgacattgccgtggaatgggagagcaatggccagcctgagaacaactacaagacaacccctcctgtgctggacagcgacggctcattcttcctgtacagcaagctgacagtcgacaagtccagatggcagcagggcaacgtgttcagttgcagcgtgctgcacgaggccctgcacagtcactacacccagaagtccctgagcctgtctcctggatagtga

SEQ ID NO: 132 - DNA, 2193 bp, synthetic construct
  misc_feature 1..2193: note = MX492 A19-46   A23-58H/B1-182L - DNA
  source 1..2193: mol_type = other DNA
cagaccgtggtcacacaagagcctagctttagcgtgtcccctggcggcacagtgacactgacatgtggactttctagcggatctgtgtccaccgcctactttcccagctggtatcaacagaccccaggccaggcacctcggacactgatctacggcaccaacacaagatccagcggcgtgcccgataggttcagcggatctatcctgggcaacaaggccgcactgactatcacaggcgcccaggccgatgacgagagcgattactactgcgtgctgtacatgggcagaggcatcgtggtttttggcggaggcaccaagctgacagtgcttggcggatctagcggcgagatcgtgctgacacagagccctggcacactgtcactgtctccaggcgaaagagccacactgagctgtagagccagccagagcgtgtccagctcttacctggcttggtatcagcagaagcccggacaggctcccagactgctgatctatggcgcctctagcagagccaccggctttcccgatagattttctggcagcggctccggcaccgacttcaccctgacaatcagcagactggaacccgaggacttcgccgtgtactactgtcagcagtacggcaacagcccctggacatttggccagggcaccaaggtggaaatcagaggaggcggaggatctggcggatctggaagtggtggcggtggatctgcttctggctctggacaaatgcagctcgttcagagcggccctgaagtgaagaaacctggcacctccgtgaaggtgtcctgcaaggccagcggcttcacctttacaagctctgccgtgcagtgggttcgacaagctagaggccagagactggaatggatcggctggatcgttgtcggcagcggcaacaccaattacgcccagaaattccaagagcgcgtgaccatcaccagagacatgagcaccagcacagcctacatggaactgagcagtctgcgcagcgaagataccgctgtgtactattgtgccgctcctaactgcagcaacgtcgtgtgctacgatggcttcgacatctggggacagggcacaatggtcaccgtgtcctctggcggaagtagcggccaggtgcagctggttgaatctggtggcggagttgtgcagcctggcagaagcctgagactgtcttgtgccgcctctggctttaccctgagcagctatggcatgcactgggtccgacaggcccctggcaaaggacttgaatgggtcgccgtgatcagctacgacggcagcaacaagtactacgtggacagcgtgaagggcagattcaccatcagccgggacaacagcaagaacaccctgtacctgcagatgaacagcctgagagccgaggacacagccgtgtattattgcgccagaggctgggcctattgggagctgctgcctgactactactacggcatggatgtgtggggccagggaaccacagtgaccgtgtctagcgcttctggcggctccggagataagacccacacatgtcctccatgtcctgctccagaactgctcggcggcccttctgtgttcctgtttcctccaaagcctaaggacaccctgatgatcagcagaacccctgaagtgacctgcgtggtggtggatgtgtctcacgaggaccccgaagtgaagttcaattggtacgtggacggcgtggaagtgcacaacgccaagaccaagcctagagaggaacagtacaacagcacctacagagtggtgtccgtgctgaccgtgctgcaccaggattggctgaacggcaaagagtacaagtgcaaggtgtccaacaaggccctgcctgctcctatcgagaaaaccatcagcaaggccaagggccagcctagggaaccccaggtttacacccttcctccaagccgggatgagctgaccaagaaccaggtgtccctgacatgtctcgtgaagggcttctaccccagcgacattgccgtggaatgggagagcaatggccagcctgagaacaactacaagacaacccctcctgtgctggacagcgacggctcattcttcctgtacagcaagctgacagtcgacaagtccagatggcagcagggcaacgtgttcagttgcagcgtgctgcacgaggccctgcacagtcactacacccagaagtccctgagcctgtctcctggatagtga

SEQ ID NO: 133 - DNA, 2865 bp, synthetic construct
  misc_feature 1..2865: note = MX493 A19-46   A23-58H/B1-182L CL-CH1 - DNA
  source 1..2865: mol_type = other DNA
cagaccgtggtcacacaagagcctagctttagcgtgtcccctggcggcacagtgacactgacatgtggactttctagcggatctgtgtccaccgcctactttcccagctggtatcaacagaccccaggccaggcacctcggacactgatctacggcaccaacacaagatccagcggcgtgcccgataggttcagcggatctatcctgggcaacaaggccgcactgactatcacaggcgcccaggccgatgacgagagcgattactactgcgtgctgtacatgggcagaggcatcgtggtttttggcggaggcaccaagctgacagtgcttggcggatctagcggcgagatcgtgctgacacagagccctggcacactgtcactgtctccaggcgaaagagccacactgagctgtagagccagccagagcgtgtccagctcttacctggcttggtatcagcagaagcccggacaggctcccagactgctgatctatggcgcctctagcagagccaccggctttcccgatagattttctggcagcggctccggcaccgacttcaccctgacaatcagcagactggaacccgaggacttcgccgtgtactactgtcagcagtacggcaacagcccctggacatttggccagggcaccaaggtggaaatcagaggaggcggaggatctggcggatctggaagtggtggcggtggatctgcttctggctctggacaaatgcagctcgttcagagcggccctgaagtgaagaaacctggcacctccgtgaaggtgtcctgcaaggccagcggcttcacctttacaagctctgccgtgcagtgggttcgacaagctagaggccagagactggaatggatcggctggatcgttgtcggcagcggcaacaccaattacgcccagaaattccaagagcgcgtgaccatcaccagagacatgagcaccagcacagcctacatggaactgagcagtctgcgcagcgaagataccgctgtgtactattgtgccgctcctaactgcagcaacgtcgtgtgctacgatggcttcgacatctggggacagggcacaatggtcaccgtgtcctctggcggaagtagcggccaggtgcagctggttgaatctggtggcggagttgtgcagcctggcagaagcctgagactgtcttgtgccgcctctggctttaccctgagcagctatggcatgcactgggtccgacaggcccctggcaaaggacttgaatgggtcgccgtgatcagctacgacggcagcaacaagtactacgtggacagcgtgaagggcagattcaccatcagccgggacaacagcaagaacaccctgtacctgcagatgaacagcctgagagccgaggacacagccgtgtattattgcgccagaggctgggcctattgggagctgctgcctgactactactacggcatggatgtgtggggccagggaaccacagtgaccgtgtctagccgtacggtggccgctcccagcgtgttcatcttcccacctagcgacgagcagctgaagtccggcacagcctctgtcgtgtgcctgctgaacaacttctacccccgcgaggccaaagtgcagtggaaggtggacaacgccctgcagagcggcaacagccaggaaagcgtgaccgagcaggacagcaaggactccacctacagcctgagcagcaccctgacactgagcaaggccgactacgagaagcacaaggtgtacgcctgcgaagtgacccaccagggcctgtctagccccgtgaccaagagcttcaaccggggcgagtgtggtggcggaggtagcggaggcagcggcagcggaggaggcgggagcgccagcggcagcggagcttcgaccaagggcccatccgtgtttcctctggctcccagcagcaagtctacaagcggaggaacagccgctctgggctgcctggtcaaggattactttcccgagcctgtgaccgtgtcctggaattctggcgctctgacaagcggcgtgcacacctttccagctgtgctgcaaagcagcggcctgtactctctgagcagcgtggtcacagtgcctagctctagcctgggcacccagacctacatctgcaatgtgaaccacaagcctagcaacaccaaggtggacaagaaggtggaacccaagagctgcgataagacccacacatgtcctccatgtcctgctccagaactgctcggcggcccttctgtgttcctgtttcctccaaagcctaaggacaccctgatgatcagcagaacccctgaagtgacctgcgtggtggtggatgtgtctcacgaggaccccgaagtgaagttcaattggtacgtggacggcgtggaagtgcacaacgccaagaccaagcctagagaggaacagtacaacagcacctacagagtggtgtccgtgctgaccgtgctgcaccaggattggctgaacggcaaagagtacaagtgcaaggtgtccaacaaggccctgcctgctcctatcgagaaaaccatcagcaaggccaagggccagcctagggaaccccaggtttacacccttcctccaagccgggatgagctgaccaagaaccaggtgtccctgacatgtctcgtgaagggcttctaccccagcgacattgccgtggaatgggagagcaatggccagcctgagaacaactacaagacaacccctcctgtgctggacagcgacggctcattcttcctgtacagcaagctgacagtcgacaagtccagatggcagcagggcaacgtgttcagttgcagcgtgctgcacgaggccctgcacagtcactacacccagaagtccctgagcctgtctcctggatagtga

SEQ ID NO: 134 - DNA, 2187 bp, synthetic construct
  misc_feature 1..2187: note = MX494 A19-61   B1-182 L1 IgG1 Kcc - DNA
  source 1..2187: mol_type = other DNA
gacatccagatgacacagagccctagcagcgtgtccgcctctgtgggagacagagtgatcatcacctgtagagccagccagggcatcagctcttggctggcttggtatcagcagaagcctggcaaggcccctaaggtgctgatctacgatgccagctctctgcagtctggcgtgcccagcagattttctggcagcggctacggcaccgacttcaccctgaccatatctagcctgcagcctgaggacagcgccacctactattgtcagcaggccaagtctttccccatcaccttcggccagggcaccagactggaaatcaaaggcggaagcagcggcgagatcgtgctgactcaatctcccggcacactgtctctgagccctggcgaaagagccacactgagctgtagagcttcccagagcgtgtccagcagctacctcgcctggtatcaacaaaagcccggacaggctccccggctgctgatatatggtgcctctagcagagccaccggctttcccgatagattcagcggctctggctctggcacagatttcacactgacaatcagcaggctggaacccgaggacttcgccgtgtattactgccagcagtacggcaacagcccctggacatttggccagggaacaaaggtggaaattagaggcggcggaggctctggcggatctggatctggtggcggaggatctgcttctggaagcggacagatgcagctggtgcagagcggacccgaagtgaagaaacctggcaccagcgtgaaggtgtcctgcaaggccagcggcttcacctttacaagctctgccgtgcagtgggtccgacaggctagaggacaacggctggaatggatcggctggatcgtcgtcggcagcggcaataccaattacgcccagaaattccaagagcgcgtgaccatcaccagagacatgagcaccagcaccgcctacatggaactgtccagcctgagaagcgaggataccgccgtgtactattgcgccgctccttactgtagcggcggcagctgctttgacggctttgacatttggggacagggcacaatggtcacagtgtccagcggcggatcttctggccaggttcagctggttgaatctggcggaggtgttgtgcagcctggcagatccctgagactgtcttgtgccgcctccggctttaccttcagctcctacgccttccactgggttcgacaagcccctggcaaaggcctggaatgggttgccgtgatcagctacgacggcagcaaccagtactacgccgactccgtgaagggcagattcaccatcagccgggacaacagcaagaacaccctgtacctgcagatgaacagcctgcgggccgatgacaccgctgtgtattattgtgcccgcgacctggccattgccgtggctggaacatggcactactacaacggcatggacgtgtggggccaaggcaccacagtgacagtgtctagtgcttctggcggctccggagataagacccacacatgtcctccatgtcctgctccagaactgctgggcggaccttccgtgtttctgttccctccaaagcctaaggacaccctgatgatcagcaggacccctgaagtgacctgcgtggtggtggatgtgtctcacgaggacccagaagtgaagttcaattggtacgtggacggcgtggaagtgcacaacgccaagaccaagcctagagaggaacagtacaacagcacctacagagtggtgtccgtgctgacagtgctgcaccaggattggctgaacggcaaagagtacaagtgcaaggtgtccaacaaggccctgcccgcccctatcgagaaaaccatcagcaaggccaagggccagcctagggaaccccaggtttacacccttcctccatgccgggatgagctgaccaagaaccaggtgtccctgtggtgtctggtcaagggcttctaccccagcgacattgccgtggaatgggagagcaatggccagcctgagaacaactacaagaccacacctcctgtgctggactccgacggatcattcttcctgtacagcaagctgactgtggacaagagcagatggcagcagggcaacgtgttcagctgcagcgtgatgcacgaggccctgcacaaccactacacacagaagtccctgtctctgagccctggctagtga

SEQ ID NO: 135 - DNA, 2193 bp, synthetic construct
  misc_feature 1..2193: note = MX494 A19-46   B1-182 L1 IgG1 Hcc - DNA
  source 1..2193: mol_type = other DNA
cagaccgtggtcacacaagagcctagcttctccgtgtctcctggcggcacagtgacactgacatgtggccttagcagcggcagcgtgtccaccgcctattttcccagctggtatcagcagacccctggacaggctccccggacactgatctacggcaccaataccagatccagcggcgtgcccgatagattcagcggctctatcctgggcaacaaggccgcactgacaatcacaggcgcccaggccgatgacgagagcgattactactgcgtgctgtacatgggcagaggcatcgtggtttttggcggaggcaccaagctgacagtgctcggaggatcttctggcgagatcgtgctgacacagagccccggaacactgtcactgtctccaggcgaaagagccacactgagctgtagagccagccagagcgtgtcctctagctacctggcctggtatcaacaaaagcccggacaggcccctcggctgctgatatatggtgcctctagcagagccaccggctttcccgacagattttctggcagcggaagcggcaccgacttcaccctgaccatctccagactggaacccgaggacttcgccgtgtactactgtcagcagtacggcaacagcccctggacctttggccagggcacaaaggtggaaatcagaggcggaggtggaagcggcggaagtggatctggcggtggtggatctgcttctggctctggacagatgcagctggtgcagtctggccccgaagtgaagaaacctggcaccagcgtgaaggtgtcctgcaaggccagcggcttcacctttacaagctctgccgtgcagtgggtccgacaggcaagaggacaacggctggaatggatcggctggatcgttgtcggcagcggcaacaccaattacgcccagaaattccaagagcgcgtgaccatcaccagggacatgagcacaagcaccgcctacatggaactgagcagcctgagaagcgaggacacagccgtgtattattgcgccgctccttactgtagcggcggcagctgctttgacggctttgacatttggggccagggaaccatggtcacagtgtctagcggtggaagctctggccaggtccagcttgttgaatctggtggcggagtggtgcagccaggcagaagtctgagactgtcttgtgccgcctccggctttaccctgagcagctatggaatgcactgggttcgacaagcccctggcaaaggcctggaatgggttgccgtgatcagctacgacggcagcaacaagtactacgtggactccgtgaagggcagattcaccatcagccgggacaacagcaagaacaccctgtacctgcagatgaactccctgagagccgaagataccgctgtgtactattgtgccagaggctgggcctactgggagctgctgcccgattactattacggcatggacgtgtggggacagggcaccacagttacagtgtcatctgcctctggcggctccggagataagacccacacatgtcctccatgtcctgctccagagctgctgggtggcccttccgtgtttctgttccctccaaagcctaaggacaccctgatgatcagcaggacccctgaagtgacctgcgtggtggtggatgtgtctcacgaggacccagaagtgaagttcaattggtacgtggacggcgtggaagtgcacaacgccaagaccaagcctagagaggaacagtacaacagcacctacagagtggtgtccgtgctgaccgtgctgcaccaggattggctgaacggcaaagagtacaagtgcaaggtgtccaacaaggccctgcccgctcctatcgagaaaaccatcagcaaggccaagggccagcctcgcgaacctcaagtctgtacactgcctcctagccgggacgagctgaccaagaatcaggtgtcactgagctgcgccgtgaagggcttttaccccagcgacattgccgtggaatgggagagcaatggccagccagagaacaactacaagacaacccctcctgtgctggacagcgacggctcatttttcctggtgtccaagctgacagtggacaagagcagatggcagcagggcaacgtgttcagctgcagcgtgatgcacgaggccctgcacaaccactacacccagaaaagcctgtctctgagccctggctagtga

SEQ ID NO: 136 - DNA, 2187 bp, synthetic construct; identical to SEQ ID NO: 134
  misc_feature 1..2187: note = MX495 A19-61   B1-182 L1 IgG1 Kcc - DNA
  source 1..2187: mol_type = other DNA

SEQ ID NO: 137 - DNA, 2193 bp, synthetic construct
  misc_feature 1..2193: note = MX495 B1-182   A19-46 L1 IgG1 Hcc - DNA
  source 1..2193: mol_type = other DNA
gagatcgtgctgacacagagccctggcacactgtcactgtctccaggcgaaagagccacactgagctgtagagccagccagagcgtgtccagctcttacctggcttggtatcagcagaagcccggacaggctcccagactgctgatctatggcgcctctagcagagccaccggctttcccgatagattttctggcagcggctccggcaccgacttcaccctgacaatcagcagactggaacccgaggacttcgccgtgtactactgtcagcagtacggcaacagcccctggacatttggccagggcaccaaggtggaaatcagaggcggatctagcggccagaccgtggtcacacaagagcctagctttagcgtgtcccctggcggcacagtgacactgacatgtggactttctagcggatctgtgtccaccgcctactttcccagctggtatcaacagaccccaggccaggcacctcggacactgatctacggcaccaacacaagatccagcggcgtgcccgataggttcagcggatctatcctgggcaacaaggccgcactgactatcacaggcgcccaggccgatgacgagagcgattactactgcgtgctgtacatgggcagaggcatcgtggtttttggcggaggcaccaagctgacagtgcttggaggcggaggatctggcggatctggaagtggtggcggtggatctgcttctggctctggacaggtgcagctggttgaatctggtggcggagttgtgcagcctggcagaagcctgagactgtcttgtgccgcctctggctttaccctgagcagctatggcatgcactgggtccgacaggcccctggcaaaggacttgaatgggtcgccgtgatcagctacgacggcagcaacaagtactacgtggacagcgtgaagggcagattcaccatcagccgggacaacagcaagaacaccctgtacctgcagatgaacagcctgagagccgaggacacagccgtgtattattgcgccagaggctgggcctattgggagctgctgcctgactactactacggcatggatgtgtggggccagggaaccacagtgaccgtgtctagcggcggaagtagcggccaaatgcagctcgttcagagcggccctgaagtgaagaaacctggcacctccgtgaaggtgtcctgcaaggccagcggcttcacctttacaagctctgccgtgcagtgggttcgacaagctagaggccagagactggaatggatcggctggatcgttgtcggcagcggcaacaccaattacgcccagaaattccaagagcgcgtgaccatcaccagagacatgagcaccagcacagcctacatggaactgagcagtctgcgcagcgaagataccgctgtgtactattgtgccgctccttactgtagcggcggcagctgctttgacggctttgacatttggggacagggcacaatggtcaccgtgtcctctgcttccggtggatccggagataagacccacacatgtcctccatgtcctgctccagagctgctgggtggcccttccgtgtttctgttccctccaaagcctaaggacaccctgatgatcagcaggacccctgaagtgacctgcgtggtggtggatgtgtctcacgaggacccagaagtgaagttcaattggtacgtggacggcgtggaagtgcacaacgccaagaccaagcctagagaggaacagtacaacagcacctacagagtggtgtccgtgctgaccgtgctgcaccaggattggctgaacggcaaagagtacaagtgcaaggtgtccaacaaggccctgcccgctcctatcgagaaaaccatcagcaaggccaagggccagcctcgcgaacctcaagtctgtacactgcctcctagccgggacgagctgaccaagaatcaggtgtcactgagctgcgccgtgaagggcttttaccccagcgacattgccgtggaatgggagagcaatggccagccagagaacaactacaagacaacccctcctgtgctggacagcgacggctcatttttcctggtgtccaagctgacagtggacaagagcagatggcagcagggcaacgtgttcagctgcagcgtgatgcacgaggccctgcacaaccactacacccagaaaagcctgtctctgagccctggctagtga

SEQ ID NO: 138 - DNA, 2187 bp, synthetic construct
  misc_feature 1..2187: note = MX496 B1-182   A19-61 L1 IgG1 Kcc - DNA
  source 1..2187: mol_type = other DNA
gagatcgtgctgacacagagccctggcacactgtcactgtctccaggcgaaagagccacactgagctgtagagccagccagagcgtgtccagctcttacctggcttggtatcagcagaagcccggacaggctcccagactgctgatctatggcgcctctagcagagccaccggctttcccgatagattttctggcagcggctccggcaccgacttcaccctgacaatcagcagactggaacccgaggacttcgccgtgtactactgtcagcagtacggcaacagcccctggacatttggccagggcaccaaggtggaaatcagaggcggaagctctggcgacatccagatgacccagtctccaagctccgtgtctgccagcgtgggcgacagagtgatcatcacatgcagagcctctcagggcatcagctcttggctcgcctggtatcaacaaaagcctggcaaggcccctaaggtcctgatctacgatgccagctctctgcagtctggcgtgcccagcagattttccggctctggctacggcacagatttcacactcaccataagcagcctgcagcctgaggacagcgccacctattattgccagcaggccaagtctttccccatcaccttcggccagggaacacgcctcgaaatcaaaggtggcggaggatctggcggctctggaagcggcggaggcggatctgcttctggatctggacaggtgcagctggtggaaagtggcggcggagttgttcagcctggcagaagcctgagactgtcttgtgccgccagcggcttcacctttagcagctacgccttccactgggtccgacaggcacctggcaaaggccttgaatgggtcgccgtgatcagctacgacggcagcaatcagtactacgccgacagcgtgaagggcagattcaccatcagccgggacaacagcaagaacaccctgtacctgcagatgaacagcctgagagccgacgacaccgccgtgtattattgtgcccgcgatctggccattgccgtggccggaacatggcactactacaacggcatggatgtgtggggacagggcacaaccgtgaccgtttctagcggcggatctagcggccagatgcagctcgttcagtctggccccgaagtgaagaaacctggcacctccgtgaaggtgtcctgcaaggcctccggctttaccttcacaagctctgccgtgcagtgggttcgacaagccagaggccaacggctggaatggatcggctggatcgttgtcggcagcggcaacaccaattacgcccagaaattccaagagcgcgtgaccatcaccagagacatgagcaccagcaccgcctacatggaactgtctagcctgcggagcgaggataccgctgtgtactattgcgccgctccttactgtagcggcggcagctgctttgacggctttgacatttggggccaaggcacaatggtcacagtgtcctctgcctctggtggctccggagataagacccacacatgtcctccatgtcctgctccagaactgctgggcggaccttccgtgtttctgttccctccaaagcctaaggacaccctgatgatcagcaggacccctgaagtgacctgcgtggtggtggatgtgtctcacgaggacccagaagtgaagttcaattggtacgtggacggcgtggaagtgcacaacgccaagaccaagcctagagaggaacagtacaacagcacctacagagtggtgtccgtgctgacagtgctgcaccaggattggctgaacggcaaagagtacaagtgcaaggtgtccaacaaggccctgcccgcccctatcgagaaaaccatcagcaaggccaagggccagcctagggaaccccaggtttacacccttcctccatgccgggatgagctgaccaagaaccaggtgtccctgtggtgtctggtcaagggcttctaccccagcgacattgccgtggaatgggagagcaatggccagcctgagaacaactacaagaccacacctcctgtgctggactccgacggatcattcttcctgtacagcaagctgactgtggacaagagcagatggcagcagggcaacgtgttcagctgcagcgtgatgcacgaggccctgcacaaccactacacacagaagtccctgtctctgagccctggctagtga

SEQ ID NO: 139 - DNA, 2193 bp, synthetic construct; identical to SEQ ID NO: 135
  misc_feature 1..2193: note = MX496 A19-46   B1-182 L1 IgG1 Hcc - DNA
  source 1..2193: mol_type = other DNA

SEQ ID NO: 140 - DNA, 2187 bp, synthetic construct; identical to SEQ ID NO: 138
  misc_feature 1..2187: note = MX497 B1-182   A19-61 L1 IgG1 Kcc - DNA
  source 1..2187: mol_type = other DNA

SEQ ID NO: 141 - DNA, 2193 bp, synthetic construct; identical to SEQ ID NO: 137
  misc_feature 1..2193: note = MX497 B1-182   A19-46 L1 IgG1 Hcc - DNA
  source 1..2193: mol_type = other DNA

SEQ ID NO: 142 - DNA, 2193 bp, synthetic construct
  misc_feature 1..2193: note = MX498 A23-58H/B1-182L   A19-46 L1 IgG1 Kcc LS - DNA
  source 1..2193: mol_type = other DNA
gagatcgtgctgacacagagccctggcacactgtcactgtctccaggcgaaagagccacactgagctgtagagccagccagagcgtgtccagctcttacctggcttggtatcagcagaagcccggacaggctcccagactgctgatctatggcgcctctagcagagccaccggctttcccgatagattttctggcagcggctccggcaccgacttcaccctgacaatcagcagactggaacccgaggacttcgccgtgtactactgtcagcagtacggcaacagcccctggacatttggccagggcaccaaggtggaaatcagaggcggatctagcggccagaccgtggtcacacaagagcctagctttagcgtgtcccctggcggcacagtgacactgacatgtggactttctagcggatctgtgtccaccgcctactttcccagctggtatcaacagaccccaggccaggcacctcggacactgatctacggcaccaacacaagatccagcggcgtgcccgataggttcagcggatctatcctgggcaacaaggccgcactgactatcacaggcgcccaggccgatgacgagagcgattactactgcgtgctgtacatgggcagaggcatcgtggtttttggcggaggcaccaagctgacagtgcttggaggcggaggatctggcggatctggaagtggtggcggtggatctgcttctggctctggacaggtgcagctggttgaatctggtggcggagttgtgcagcctggcagaagcctgagactgtcttgtgccgcctctggctttaccctgagcagctatggcatgcactgggtccgacaggcccctggcaaaggacttgaatgggtcgccgtgatcagctacgacggcagcaacaagtactacgtggacagcgtgaagggcagattcaccatcagccgggacaacagcaagaacaccctgtacctgcagatgaacagcctgagagccgaggacacagccgtgtattattgcgccagaggctgggcctattgggagctgctgcctgactactactacggcatggatgtgtggggccagggaaccacagtgaccgtgtctagcggcggaagtagcggccaaatgcagctcgttcagagcggccctgaagtgaagaaacctggcacctccgtgaaggtgtcctgcaaggccagcggcttcacctttacaagctctgccgtgcagtgggttcgacaagctagaggccagagactggaatggatcggctggatcgttgtcggcagcggcaacaccaattacgcccagaaattccaagagcgcgtgaccatcaccagagacatgagcaccagcacagcctacatggaactgagcagtctgcgcagcgaagataccgctgtgtactattgtgccgctcctaactgcagcaacgtcgtgtgctacgatggcttcgacatctggggacagggcacaatggtcaccgtgtcctctgcttctggcggctccggagataagacccacacatgtcctccatgtcctgctccagaactgctcggcggcccttctgtgttcctgtttcctccaaagcctaaggacaccctgatgatcagcagaacccctgaagtgacctgcgtggtggtggatgtgtctcacgaggaccccgaagtgaagttcaattggtacgtggacggcgtggaagtgcacaacgccaagaccaagcctagagaggaacagtacaacagcacctacagagtggtgtccgtgctgaccgtgctgcaccaggattggctgaacggcaaagagtacaagtgcaaggtgtccaacaaggccctgcctgctcctatcgagaaaaccatcagcaaggccaagggccagcctagggaaccccaggtttacacccttcctccatgccgggatgagctgaccaagaaccaggtgtccctgtggtgtctcgtgaagggcttctaccccagcgacattgccgtggaatgggagagcaatggccagcctgagaacaactacaagacaacccctcctgtgctggacagcgacggctcattcttcctgtacagcaagctgacagtcgacaagtccagatggcagcagggcaacgtgttcagttgcagcgtgctgcacgaggccctgcacagtcactacacccagaagtccctgagcctgtctcctggatagtga

SEQ ID NO: 143 - DNA, 2187 bp, synthetic construct
  misc_feature 1..2187: note = MX498 A23-58H/B1-182L   A19-61 L1 IgG1 Hcc LS - DNA
  source 1..2187: mol_type = other DNA
gaaattgtgctgacccagtctccagggactctgagccttagtcctggcgagagagctaccctgtcttgcagagcctctcagtccgtgtcctctagctatctcgcctggtatcaacaaaagcctgggcaagcccctcggctgctgatatacggtgctagcagcagagctacaggcttccctgacaggtttagcggctctggaagcggcacagatttcacactgaccatctctcggctggaacctgaagattttgccgtctattattgccagcagtatgggaactccccttggaccttcggacagggaacaaaggtcgagattagaggcggaagctctggcgacatccagatgacacagagccctagcagcgtgtccgcctctgtgggagacagagtgatcatcacctgtagagccagccagggcatcagctcttggctggcttggtatcagcagaagcctggcaaggcccctaaggtgctgatctacgatgccagctctctgcagtctggcgtgcccagcagattttctggcagcggctacggcaccgacttcaccctgaccatatctagcctgcagcctgaggacagcgccacctactattgtcagcaggccaagtctttccccatcaccttcggccagggcaccagactggaaatcaaaggcggcggaggaagcggcggatctggatctggtggcggaggatctgcttctggctctggacaggttcagctggttgaatctggcggaggtgttgtgcagcctggcagatccctgagactgtcttgtgccgcctccggctttaccttcagctcctacgccttccactgggttcgacaagcccctggcaaaggcctggaatgggttgccgtgatcagctacgacggcagcaaccagtactacgccgactccgtgaagggcagattcaccatcagccgggacaacagcaagaacaccctgtacctgcagatgaacagcctgcgggccgatgacaccgctgtgtattattgtgcccgcgacctggccattgccgtggctggaacatggcactactacaacggcatggacgtgtggggccaaggcaccacagtgacagtgtctagtggcggatctagcggccagatgcagctggtgcagtctggccccgaagtgaagaaacctggcaccagcgtgaaggtgtcctgcaaggccagcggcttcacctttacaagctctgccgtgcagtgggtccgacaggcaagaggacaacggctggaatggatcggctggatcgttgtcggcagcggcaacaccaattacgcccagaaattccaagagcgcgtgaccatcaccagagacatgagcaccagcaccgcctacatggaactgagcagcctgagaagcgaggacacagcagtgtactattgcgccgctcctaactgctccaacgtcgtgtgctacgacggcttcgatatctggggccagggaaccatggtcaccgtgtcaagtgcttctggcggctccggagataagacccacacatgtcctccatgtcctgctccagaactgctcggcggcccttctgtgttcctgtttcctccaaagcctaaggacaccctgatgatcagcagaacccctgaagtgacctgcgtggtggtggatgtgtctcacgaggaccccgaagtgaagttcaattggtacgtggacggcgtggaagtgcacaacgccaagaccaagcctagagaggaacagtacaacagcacctacagagtggtgtccgtgctgaccgtgctgcaccaggattggctgaacggcaaagagtacaagtgcaaggtgtccaacaaggccctgcctgctcctatcgagaaaaccatcagcaaggccaagggccagcctagggaaccccaggtttgtacccttcctccaagccgggatgagctgaccaagaaccaggtgtccctgagctgtgccgtgaagggcttctaccccagcgacattgccgtggaatgggagagcaatggccagcctgagaacaactacaagacaacccctcctgtgctggacagcgacggctcattcttcctggtgagcaagctgacagtcgacaagtccagatggcagcagggcaacgtgttcagttgcagcgtgctgcacgaggccctgcacagtcactacacccagaagtccctgagcctgtctcctggatagtga

SEQ ID NO: 144 - DNA, 2193 bp, synthetic construct; identical to SEQ ID NO: 142
  misc_feature 1..2193: note = MX499 A23-58H/B1-182L   A19-46 L1 IgG1 Kcc LS - DNA
  source 1..2193: mol_type = other DNA

SEQ ID NO: 145 - DNA, 2187 bp, synthetic construct
  misc_feature 1..2187: note = MX499 A19-61   A23-58H/B1-182L L1 IgG1 Hcc LS - DNA
  source 1..2187: mol_type = other DNA
gacatccagatgacacagagccctagcagcgtgtccgcctctgtgggagacagagtgatcatcacctgtagagccagccagggcatcagctcttggctggcttggtatcagcagaagcctggcaaggcccctaaggtgctgatctacgatgccagctctctgcagtctggcgtgcccagcagattttctggcagcggctacggcaccgacttcaccctgaccatatctagcctgcagcctgaggacagcgccacctactattgtcagcaggccaagtctttccccatcaccttcggccagggcaccagactggaaatcaaaggcggaagctctggcgaaattgtgctgacccagtctccagggactctgagccttagtcctggcgagagagctaccctgtcttgcagagcctctcagtccgtgtcctctagctatctcgcctggtatcaacaaaagcctgggcaagcccctcggctgctgatatacggtgctagcagcagagctacaggcttccctgacaggtttagcggctctggaagcggcacagatttcacactgaccatctctcggctggaacctgaagattttgccgtctattattgccagcagtatgggaactccccttggaccttcggacagggaacaaaggtcgagattagaggcggcggaggaagcggcggatctggatctggtggcggaggatctgcttctggctctggacagatgcagctggtgcagtctggccccgaagtgaagaaacctggcaccagcgtgaaggtgtcctgcaaggccagcggcttcacctttacaagctctgccgtgcagtgggtccgacaggcaagaggacaacggctggaatggatcggctggatcgttgtcggcagcggcaacaccaattacgcccagaaattccaagagcgcgtgaccatcaccagagacatgagcaccagcaccgcctacatggaactgagcagcctgagaagcgaggacacagcagtgtactattgcgccgctcctaactgctccaacgtcgtgtgctacgacggcttcgatatctggggccagggaaccatggtcaccgtgtcaagtggcggatctagcggccaggttcagctggttgaatctggcggaggtgttgtgcagcctggcagatccctgagactgtcttgtgccgcctccggctttaccttcagctcctacgccttccactgggttcgacaagcccctggcaaaggcctggaatgggttgccgtgatcagctacgacggcagcaaccagtactacgccgactccgtgaagggcagattcaccatcagccgggacaacagcaagaacaccctgtacctgcagatgaacagcctgcgggccgatgacaccgctgtgtattattgtgcccgcgacctggccattgccgtggctggaacatggcactactacaacggcatggacgtgtggggccaaggcaccacagtgacagtgtctagtgcttctggcggctccggagataagacccacacatgtcctccatgtcctgctccagaactgctcggcggcccttctgtgttcctgtttcctccaaagcctaaggacaccctgatgatcagcagaacccctgaagtgacctgcgtggtggtggatgtgtctcacgaggaccccgaagtgaagttcaattggtacgtggacggcgtggaagtgcacaacgccaagaccaagcctagagaggaacagtacaacagcacctacagagtggtgtccgtgctgaccgtgctgcaccaggattggctgaacggcaaagagtacaagtgcaaggtgtccaacaaggccctgcctgctcctatcgagaaaaccatcagcaaggccaagggccagcctagggaaccccaggtttgtacccttcctccaagccgggatgagctgaccaagaaccaggtgtccctgagctgtgccgtgaagggcttctaccccagcgacattgccgtggaatgggagagcaatggccagcctgagaacaactacaagacaacccctcctgtgctggacagcgacggctcattcttcctggtgagcaagctgacagtcgacaagtccagatggcagcagggcaacgtgttcagttgcagcgtgctgcacgaggccctgcacagtcactacacccagaagtccctgagcctgtctcctggatagtga

SEQ ID NO: 146 - DNA, 2193 bp, synthetic construct
  misc_feature 1..2193: note = MX500 A19-46   A23-58H/B1-182L L1 IgG1 Kcc LS - DNA
  source 1..2193: mol_type = other DNA
cagaccgtggtcacacaagagcctagctttagcgtgtcccctggcggcacagtgacactgacatgtggactttctagcggatctgtgtccaccgcctactttcccagctggtatcaacagaccccaggccaggcacctcggacactgatctacggcaccaacacaagatccagcggcgtgcccgataggttcagcggatctatcctgggcaacaaggccgcactgactatcacaggcgcccaggccgatgacgagagcgattactactgcgtgctgtacatgggcagaggcatcgtggtttttggcggaggcaccaagctgacagtgcttggcggatctagcggcgagatcgtgctgacacagagccctggcacactgtcactgtctccaggcgaaagagccacactgagctgtagagccagccagagcgtgtccagctcttacctggcttggtatcagcagaagcccggacaggctcccagactgctgatctatggcgcctctagcagagccaccggctttcccgatagattttctggcagcggctccggcaccgacttcaccctgacaatcagcagactggaacccgaggacttcgccgtgtactactgtcagcagtacggcaacagcccctggacatttggccagggcaccaaggtggaaatcagaggaggcggaggatctggcggatctggaagtggtggcggtggatctgcttctggctctggacaaatgcagctcgttcagagcggccctgaagtgaagaaacctggcacctccgtgaaggtgtcctgcaaggccagcggcttcacctttacaagctctgccgtgcagtgggttcgacaagctagaggccagagactggaatggatcggctggatcgttgtcggcagcggcaacaccaattacgcccagaaattccaagagcgcgtgaccatcaccagagacatgagcaccagcacagcctacatggaactgagcagtctgcgcagcgaagataccgctgtgtactattgtgccgctcctaactgcagcaacgtcgtgtgctacgatggcttcgacatctggggacagggcacaatggtcaccgtgtcctctggcggaagtagcggccaggtgcagctggttgaatctggtggcggagttgtgcagcctggcagaagcctgagactgtcttgtgccgcctctggctttaccctgagcagctatggcatgcactgggtccgacaggcccctggcaaaggacttgaatgggtcgccgtgatcagctacgacggcagcaacaagtactacgtggacagcgtgaagggcagattcaccatcagccgggacaacagcaagaacaccctgtacctgcagatgaacagcctgagagccgaggacacagccgtgtattattgcgccagaggctgggcctattgggagctgctgcctgactactactacggcatggatgtgtggggccagggaaccacagtgaccgtgtctagcgcttctggcggctccggagataagacccacacatgtcctccatgtcctgctccagaactgctcggcggcccttctgtgttcctgtttcctccaaagcctaaggacaccctgatgatcagcagaacccctgaagtgacctgcgtggtggtggatgtgtctcacgaggaccccgaagtgaagttcaattggtacgtggacggcgtggaagtgcacaacgccaagaccaagcctagagaggaacagtacaacagcacctacagagtggtgtccgtgctgaccgtgctgcaccaggattggctgaacggcaaagagtacaagtgcaaggtgtccaacaaggccctgcctgctcctatcgagaaaaccatcagcaaggccaagggccagcctagggaaccccaggtttacacccttcctccatgccgggatgagctgaccaagaaccaggtgtccctgtggtgtctcgtgaagggcttctaccccagcgacattgccgtggaatgggagagcaatggccagcctgagaacaactacaagacaacccctcctgtgctggacagcgacggctcattcttcctgtacagcaagctgacagtcgacaagtccagatggcagcagggcaacgtgttcagttgcagcgtgctgcacgaggccctgcacagtcactacacccagaagtccctgagcctgtctcctggatagtga

SEQ ID NO: 147 - DNA, 2187 bp, synthetic construct; identical to SEQ ID NO: 143
  misc_feature 1..2187: note = MX500 A23-58H/B1-182L   A19-61 L1 IgG1 Hcc LS - DNA
  source 1..2187: mol_type = other DNA

SEQ ID NO: 148 - DNA, 2193 bp, synthetic construct; identical to SEQ ID NO: 146
  misc_feature 1..2193: note = MX501 A19-46   A23-58H/B1-182L L1 IgG1 Kcc LS - DNA
  source 1..2193: mol_type = other DNA

SEQ ID NO: 149 - DNA, 2187 bp, synthetic construct; identical to SEQ ID NO: 145
  misc_feature 1..2187: note = MX501 A19-61   A23-58H/B1-182L L1 IgG1 Hcc LS - DNA
  source 1..2187: mol_type = other DNA

SEQ ID NO: 150 - protein, 447 aa, synthetic construct
  REGION 1..447: note = A19-46 monoH knobLS - peptide without signal
QVQLVESGGGVVQPGRSLRLSCAASGFTLSSYGMHWVRQAPGKGLEWVAVISYDGSNKYYVDSVKGRFTISRDNSKNTLYLQMNSLRAEDTAVYYCRWAYWELLPDYYYGMDVWGQGTTVTVSSASTKGPSVFPLAPSSKSTSGGTAALGCLVKDYFPEPVTVSWNSGALTSGVHTFPAVLQSSGSLSSVVTVPSSSLGTQTYICNVNHKPSNTKVDKKVEPKSCDKTHTCPPCPAPELLGGPSVFLFPPKPKDTLMISRTPEVTCVVVDVSHEDPEVKFNWYVDGVEVHNAKTKPREEQYNSYVVSVLTVLHQDWLNGKEYKCKVSNKALPAPIEKTISKAKGQPREPQVYTLPPCRDELTKNQVSLWCLVKGFYPSDIAVEWESNGQPENNYKTTPPVLDSDGSFFKKLTVDKSRWQQGNVFSCSVLHEALHSHYTQKSLSLSPG

SEQ ID NO: 151 - protein, 466 aa, synthetic construct
  REGION 1..466: note = A19-46 monoH knobLS - peptide with signal
MGWSCIILFLVATATGVHSQVQLVESGGGVVQPGRSLRLSCAASGFTLSSYGMHWVRQAPGKGLEWVAVISYDGSNKYYVDSVKGRFTISRDNSKNTLYLQMNSLRAEDTAVYYCRWAYWELLPDYYYGMDVWGQGTTVTVSSASTKGPSVFPLAPSSKSTSGGTAALGCLVKDYFPEPVTVSWNSGALTSGVHTFPAVLQSSGSLSSVVTVPSSSLGTQTYICNVNHKPSNTKVDKKVEPKSCDKTHTCPPCPAPELLGGPSVFLFPPKPKDTLMISRTPEVTCVVVDVSHEDPEVKFNWYVDGVEVHNAKTKPREEQYNSYVVSVLTVLHQDWLNGKEYKCKVSNKALPAPIEKTISKAKGQPREPQVYTLPPCRDELTKNQVSLWCLVKGFYPSDIAVEWESNGQPENNYKTTPPVLDSDGSFFKKLTVDKSRWQQGNVFSCSVLHEALHSHYTQKSLSLSPG

SEQ ID NO: 152 - protein, 217 aa, synthetic construct
  REGION 1..217: note = A19-46 monoL - peptide without signal
QTVVTQEPSFSVSPGGTVTLTCGLSSGSVSTAYFPSWYQQTPGQAPRTLIYGTNTRSSGVPDRFSGSILGNKAALTITGAQADDESDYYCVLYMGRGIVVFGGGTKLTVLRTVAAPSVFIFPPSDEQLKSGTASVVCLLNNFYPREAKVQWKVDNALQSGNSQESVTEQDSKDSTYSLSSTLTLSKADYEKHKVYACEVTHQGLSSPVTKSFNRGEC

SEQ ID NO: 153 - protein, 236 aa, synthetic construct
  REGION 1..236: note = A19-46 monoL - peptide with signal
MGWSCIILFLVATATGVHSQTVVTQEPSFSVSPGGTVTLTCGLSSGSVSTAYFPSWYQQTPGQAPRTLIYGTNTRSSGVPDRFSGSILGNKAALTITGAQADDESDYYCVLYMGRGIVVFGGGTKLTVLRTVAAPSVFIFPPSDEQLKSGTASVVCLLNNFYPREAKVQWKVDNALQSGNSQESVTEQDSKDSTYSLSSTLTLSKADYEKHKVYACEVTHQGLSSPVTKSFNRGEC

SEQ ID NO: 154 - protein, 444 aa, synthetic construct
  REGION 1..444: note = B1-182_monoH_knobLS - peptide without signal
QMQLVQSGPEVKKPGTSVKVSCKASGFTFTSSAVQWVRQRQRLEWIGWIVVGSGNTNYAQKFQERVTITRDMSTSTAYMELSSLRSEDTAVYYCAAPYCSGGSCFDGFDIWGQGTMVTVSSASTKGPSVFPLAPSSKSTSGGTAALGCLVKDYFPEPVTVSWNSGALTSGVHTFPAVLQSSGSLSSVVTVPSSSLGTQTYICNVNHKPSNTKVDKKVEPKSCDKTHTCPPCPAPELLGGPSVFLFPPKPKDTLMISRTPEVTCVVVDVSHEDPEVKFNWYVDGVEVHNAKTKPREEQYNSYVVSVLTVLHQDWLNGKEYKCKVSNKALPAPIEKTISKAKGQPREPQVYTLPPCRDELTKNQVSLWCLVKGFYPSDIAVEWESNGQPENNYKTTPPVLDSDGSFFKKLTVDKSRWQQGNVFSCSVLHEALHSHYTQKSLSLSPG

SEQ ID NO: 155 - protein, 463 aa, synthetic construct
  REGION 1..463: note = B1-182_monoH_knobLS - peptide with signal
MGWSCIILFLVATATGVHSQMQLVQSGPEVKKPGTSVKVSCKASGFTFTSSAVQWVRQRQRLEWIGWIVVGSGNTNYAQKFQERVTITRDMSTSTAYMELSSLRSEDTAVYYCAAPYCSGGSCFDGFDIWGQGTMVTVSSASTKGPSVFPLAPSSKSTSGGTAALGCLVKDYFPEPVTVSWNSGALTSGVHTFPAVLQSSGSLSSVVTVPSSSLGTQTYICNVNHKPSNTKVDKKVEPKSCDKTHTCPPCPAPELLGGPSVFLFPPKPKDTLMISRTPEVTCVVVDVSHEDPEVKFNWYVDGVEVHNAKTKPREEQYNSYVVSVLTVLHQDWLNGKEYKCKVSNKALPAPIEKTISKAKGQPREPQVYTLPPCRDELTKNQVSLWCLVKGFYPSDIAVEWESNGQPENNYKTTPPVLDSDGSFFKKLTVDKSRWQQGNVFSCSVLHEALHSHYTQKSLSLSPG

SEQ ID NO: 156 - protein, 214 aa, synthetic construct
  REGION 1..214: note = B1-182_monoL - peptide without signal
EIVLTQSPGTLSLSPGERATLSCRASQSVSSSYLAWYQQKPGQAPRLLIYGASSRATGFPDRFSGSGSGTDFTLTISRLEPEDFAVYYCQQYGNSPWTFGQGTKVEIRTVAAPSVFIFPPSDEQLKSGTASVVCLLNNFYPREAKVQWKVDNALQSGNSQESVTEQDSKDSTYSLSSTLTLSKADYEKHKVYACEVTHQGLSSPVTKSFNRGEC

SEQ ID NO: 157 - protein, 233 aa, synthetic construct
  REGION 1..233: note = B1-182_monoL - peptide with signal
MGWSCIILFLVATATGVHSEIVLTQSPGTLSLSPGERATLSCRASQSVSSSYLAWYQQKPGQAPRLLIYGASSRATGFPDRFSGSGSGTDFTLTISRLEPEDFAVYYCQQYGNSPWTFGQGTKVEIRTVAAPSVFIFPPSDEQLKSGTASVVCLLNNFYPREAKVQWKVDNALQSGNSQESVTEQDSKDSTYSLSSTLTLSKADYEKHKVYACEVTHQGLSSPVTKSFNRGEC

SEQ ID NO: 158 - protein, 450 aa, synthetic construct
  REGION 1..450: note = A19-61 monoH knobLS - peptide without signal
QVQLVESGGGVVQPGRSLRLSCAASGFTFSSYAFHWVRQAPGKGLEWVAVISYDGSNQYYADSVKGRFTISRDNSKNTLYLQMNSLRADDTAVYYCARDLAIAVAGTWHYYNGMDVWGQGTTVTVSSASTKGPSVFPLAPSSKSTSGGTAALGCLVKDYFPEPVTVSWNSGALTSGVHTFPAVLQSSGSLSSVVTVPSSSLGTQTYICNVNHKPSNTKVDKKVEPKSCDKTHTCPPCPAPELLGGPSVFLFPPKPKDTLMISRTPEVTCVVVDVSHEDPEVKFNWYVDGVEVHNAKTKPREEQYNSYVVSVLTVLHQDWLNGKEYKCKVSNKALPAPIEKTISKAKGQPREPQVYTLPPCRDELTKNQVSLWCLVKGFYPSDIAVEWESNGQPENNYKTTPPVLDSDGSFFKKLTVDKSRWQQGNVFSCSVLHEALHSHYTQKSLSLSPG

SEQ ID NO: 159 - protein, 469 aa, synthetic construct
  REGION 1..469: note = A19-61 monoH knobLS - peptide with signal
MGWSCIILFLVATATGVHSQVQLVESGGGVVQPGRSLRLSCAASGFTFSSYAFHWVRQAPGKGLEWVAVISYDGSNQYYADSVKGRFTISRDNSKNTLYLQMNSLRADDTAVYYCARDLAIAVAGTWHYYNGMDVWGQGTTVTVSSASTKGPSVFPLAPSSKSTSGGTAALGCLVKDYFPEPVTVSWNSGALTSGVHTFPAVLQSSGSLSSVVTVPSSSLGTQTYICNVNHKPSNTKVDKKVEPKSCDKTHTCPPCPAPELLGGPSVFLFPPKPKDTLMISRTPEVTCVVVDVSHEDPEVKFNWYVDGVEVHNAKTKPREEQYNSYVVSVLTVLHQDWLNGKEYKCKVSNKALPAPIEKTISKAKGQPREPQVYTLPPCRDELTKNQVSLWCLVKGFYPSDIAVEWESNGQPENNYKTTPPVLDSDGSFFKKLTVDKSRWQQGNVFSCSVLHEALHSHYTQKSLSLSPG

SEQ ID NO: 160 - protein, 214 aa, synthetic construct
  REGION 1..214: note = A19-61 monoL - peptide without signal
DIQMTQSPSSVSASVGDRVIITCRASQGISSWLAWYQQKPGKAPKVLIYDASSLQSGVPSRFSGSGYGTDFTLTISSLQPEDSATYYCQQAKSFPITFGQGTRLEIKRTVAAPSVFIFPPSDEQLKSGTASVVCLLNNFYPREAKVQWKVDNALQSGNSQESVTEQDSKDSTYSLSSTLTLSKADYEKHKVYACEVTHQGLSSPVTKSFNRGEC

SEQ ID NO: 161 - protein, 233 aa, synthetic construct
  REGION 1..233: note = A19-61 monoL - peptide with signal
MGWSCIILFLVATATGVHSDIQMTQSPSSVSASVGDRVIITCRASQGISSWLAWYQQKPGKAPKVLIYDASSLQSGVPSRFSGSGYGTDFTLTISSLQPEDSATYYCQQAKSFPITFGQGTRLEIKRTVAAPSVFIFPPSDEQLKSGTASVVCLLNNFYPREAKVQWKVDNALQSGNSQESVTEQDSKDSTYSLSSTLTLSKADYEKHKVYACEVTHQGLSSPVTKSFNRGEC

SEQ ID NO: 162 - protein, 580 aa, synthetic construct
  REGION 1..580: note = A19-46_B1-182 CODVH holeLS - peptide without signal
QMQLVQSGPEVKKPGTSVKVSCKASGFTFTSSAVQWVRQRQRLEWIGWIVVGSGNTNYAQKFQERVTITRDMSTSTAYMELSSLRSEDTAVYYCAAPYCSGGSCFDGFDIWGQGTMVTVSSDKTHTQVQLVESGGGVVQPGRSLRLSCAASGFTLSSYGMHWVRQAPGKGLEWVAVISYDGSNKYYVDSVKGRFTISRDNSKNTLYLQMNSLRAEDTAVYYCRWAYWELLPDYYYGMDVWGQGTTVTVSSDKTHTASTKGPSVFPLAPSSKSTSGGTAALGCLVKDYFPEPVTVSWNSGALTSGVHTFPAVLQSSGSLSSVVTVPSSSLGTQTYICNVNHKPSNTKVDKKVEPKSCDKTHTCPPCPAPELLGGPSVFLFPPKPKDTLMISRTPEVTCVVVDVSHEDPEVKFNWYVDGVEVHNAKTKPREEQYNSYVVSVLTVLHQDWLNGKEYKCKVSNKALPAPIEKTISKAKGQPREPQVCTLPPSRDELTKNQVSLSCAVKGFYPSDIAVEWESNGQPENNYKTTPPVLDSDGSFFLVSKLTVDKSRWQQGNVFSCSVLHEALHSHYTQKSLSLSPG

SEQ ID NO: 163 - protein, 599 aa, synthetic construct
  REGION 1..599: note = A19-46_B1-182 CODVH holeLS - peptide with signal
MGWSCIILFLVATATGVHSQMQLVQSGPEVKKPGTSVKVSCKASGFTFTSSAVQWVRQRQRLEWIGWIVVGSGNTNYAQKFQERVTITRDMSTSTAYMELSSLRSEDTAVYYCAAPYCSGGSCFDGFDIWGQGTMVTVSSDKTHTQVQLVESGGGVVQPGRSLRLSCAASGFTLSSYGMHWVRQAPGKGLEWVAVISYDGSNKYYVDSVKGRFTISRDNSKNTLYLQMNSLRAEDTAVYYCRWAYWELLPDYYYGMDVWGQGTTVTVSSDKTHTASTKGPSVFPLAPSSKSTSGGTAALGCLVKDYFPEPVTVSWNSGALTSGVHTFPAVLQSSGSLSSVVTVPSSSLGTQTYICNVNHKPSNTKVDKKVEPKSCDKTHTCPPCPAPELLGGPSVFLFPPKPKDTLMISRTPEVTCVVVDVSHEDPEVKFNWYVDGVEVHNAKTKPREEQYNSYVVSVLTVLHQDWLNGKEYKCKVSNKALPAPIEKTISKAKGQPREPQVCTLPPSRDELTKNQVSLSCAVKGFYPSDIAVEWESNGQPENNYKTTPPVLDSDGSFFLVSKLTVDKSRWQQGNVFSCSVLHEALHSHYTQKSLSLSPG

SEQ ID NO: 164 - protein, 335 aa, synthetic construct
  REGION 1..335: note = A19-46_B1-182 CODVL - peptide without signal
QTVVTQEPSFSVSPGGTVTLTCGLSSGSVSTAYFPSWYQQTPGQAPRTLIYGTNTRSSGVPDRFSGSILGNKAALTITGAQADDESDYYCVLYMGRGIVVFGGGTKLTVLDKTHTEIVLTQSPGTLSLSPGERATLSCRASQSVSSSYLAWYQQKPGQAPRLLIYGASSRATGFPDRFSGSGSGTDFTLTISRLEPEDFAVYYCQQYGNSPWTFGQGTKVEIRDKTHTRTVAAPSVFIFPPSDEQLKSGTASVVCLLNNFYPREAKVQWKVDNALQSGNSQESVTEQDSKDSTYSLSSTLTLSKADYEKHKVYACEVTHQGLSSPVTKSFNRGEC

SEQ ID NO: 165 - protein, 354 aa, synthetic construct
  REGION 1..354: note = A19-46_B1-182 CODVL - peptide with signal
MGWSCIILFLVATATGVHSQTVVTQEPSFSVSPGGTVTLTCGLSSGSVSTAYFPSWYQQTPGQAPRTLIYGTNTRSSGVPDRFSGSILGNKAALTITGAQADDESDYYCVLYMGRGIVVFGGGTKLTVLDKTHTEIVLTQSPGTLSLSPGERATLSCRASQSVSSSYLAWYQQKPGQAPRLLIYGASSRATGFPDRFSGSGSGTDFTLTISRLEPEDFAVYYCQQYGNSPWTFGQGTKVEIRDKTHTRTVAAPSVFIFPPSDEQLKSGTASVVCLLNNFYPREAKVQWKVDNALQSGNSQESVTEQDSKDSTYSLSSTLTLSKADYEKHKVYACEVTHQGLSSPVTKSFNRGEC

SEQ ID NO: 166 - protein, 108 aa, synthetic construct
  REGION 1..108: note = VL - A23-58H/A23-58L94GLTG
EIVLTQSPGTLSLSPGERATLSCRASQSVSSSYLAWYQQKPGQAPRLLIYSASSRATGIPDRFSGSGSGTDFTLTISRLEPEDFAVYFCQQYGLTGWTFGQGTKVEIK

SEQ ID NO: 167 - protein, 12 aa, synthetic construct
  REGION 1..12: note = LCDR1 - A23-58H/A23-58L94GLTG
RASQSVSSSYLA

SEQ ID NO: 168 - protein, 7 aa, synthetic construct
  REGION 1..7: note = LCDR2 - A23-58H/A23-58L94GLTG
SASSRAT

SEQ ID NO: 169 - protein, 9 aa, synthetic construct
  REGION 1..9: note = LCDR3 - A23-58H/A23-58L94GLTG
QQYGLTGWT

SEQ ID NO: 170 - protein, 121 aa, synthetic construct; identical to SEQ ID NO: 74
  REGION 1..121: note = VH - A23-58H/A23-58L94GLTG

SEQ ID NO: 171 - protein, 7 aa, synthetic construct
  REGION 1..7: note = HCDR1 - A23-58H/A23-58L94GLTG
GFTFTSS

SEQ ID NO: 172 - protein, 6 aa, synthetic construct
  REGION 1..6: note = HCDR2 - A23-58H/A23-58L94GLTG
VVGSGN

SEQ ID NO: 173 - protein, 14 aa, synthetic construct
  REGION 1..14: note = HCDR3 - A23-58H/A23-58L94GLTG
PNCSNVVCYDGFDI

SEQ ID NO: 174 - protein, 109 aa, synthetic construct
  REGION 1..109: note = VL - A23-58H/A23-58L93VGLTG
EIVLTQSPGTLSLSPGERATLSCRASQSVSSSYLAWYQQKPGQAPRLLIYSASSRATGIPDRFSGSGSGTDFTLTISRLEPEDFAVYFCQQYVGLTGWTFGQGTKVEIK

SEQ ID NO: 175 - protein, 12 aa, synthetic construct
  REGION 1..12: note = LCDR1 - A23-58H/A23-58L93VGLTG
RASQSVSSSYLA

SEQ ID NO: 176 - protein, 7 aa, synthetic construct
  REGION 1..7: note = LCDR2 - A23-58H/A23-58L93VGLTG
SASSRAT

SEQ ID NO: 177 - protein, 10 aa, synthetic construct
  REGION 1..10: note = LCDR3 - A23-58H/A23-58L93VGLTG
QQYVGLTGWT

SEQ ID NO: 178 - protein, 121 aa, synthetic construct; identical to SEQ ID NO: 74
  REGION 1..121: note = VH - A23-58H/A23-58L93VGLTG

SEQ ID NO: 179 - protein, 7 aa, synthetic construct
  REGION 1..7: note = HCDR1 - A23-58H/A23-58L93VGLTG
GFTFTSS

SEQ ID NO: 180 - protein, 6 aa, synthetic construct
  REGION 1..6: note = HCDR2 - A23-58H/A23-58L93VGLTG
VVGSGN

SEQ ID NO: 181 - protein, 14 aa, synthetic construct
  REGION 1..14: note = HCDR3 - A23-58H/A23-58L93VGLTG
PNCSNVVCYDGFDI

SEQ ID NO: 182 - protein, 109 aa, synthetic construct
  REGION 1..109: note = LY-Cov1404_VL
QSALTQPASVSGSPGQSITISCTATSSDVGDYNYVSWYQQHPGKAPKLMIFEVSDRPSGISNRFSGSKSGNTASLTISGLQAEDEADYYCSSYTTSSAVFGGGTKLTVL

SEQ ID NO: 183 - protein, 14 aa, synthetic construct
  REGION 1..14: note = LY-Cov1404_VL   CDR1
TATSSDVGDYNYVS

SEQ ID NO: 184 - protein, 7 aa, synthetic construct
  REGION 1..7: note = LY-Cov1404_VL   CDR2
EVSDRPS

SEQ ID NO: 185 - protein, 9 aa, synthetic construct
  REGION 1..9: note = LY-Cov1404_VL   CDR3
SSYTTSSAV

SEQ ID NO: 186 - protein, 119 aa, synthetic construct
  REGION 1..119: note = LY-Cov1404_VH
QITLKESGPTLVKPTQTLTLTCTFSGFSLSISGVGVGWLRQPPGKALEWLALIYWDDDKRYSPSLKSRLTISKDTSKNQVVLKMTNIDPVDTATYYCAHHSISTIFDHWGQGTLVTVSS

SEQ ID NO: 187 - protein, 9 aa, synthetic construct
  REGION 1..9: note = LY-Cov1404_VH - CDR1
GFSLSISGV

SEQ ID NO: 188 - protein, 5 aa, synthetic construct
  REGION 1..5: note = LY-Cov1404_VH   CDR2
YWDDD

SEQ ID NO: 189 - protein, 9 aa, synthetic construct
  REGION 1..9: note = LY-Cov1404_VH   CDR3
HSISTIFDH

SEQ ID NO: 190 - protein, 722 aa, synthetic construct
  REGION 1..722: note = MX828 - A19-46xA23-58H/A23-58L93VGLTG
QTVVTQEPSFSVSPGGTVTLTCGLSSGSVSTAYFPSWYQQTPGQAPRTLIYGTNTRSSGVPDRFSGSILGNKAALTITGAQADDESDYYCVLYMGRGIVVFGGGTKLTVLGGSSGEIVLTQSPGTLSLSPGERATLSCRASQSVSSSYLAWYQQKPGQAPRLLIYSASSRATGIPDRFSGSGSGTDFTLTISRLEPEDFAVYFCQQYVGLTGWTFGQGTKVEIKGGGGSGGSGSGGGGSASGSGQMQLVQSGPEVKKPGTSVKVSCKASGFTFTSSAVQWVRQRQRLEWIGWIVVGSGNTNYAQKFQERVTITRDMSTSTAYMELSSLRSEDTAVYYCAAPNCSNVVCYDGFDIWGQGTMVTVSSGGSSGQVQLVESGGGVVQPGRSLRLSCAASGFTLSSYGMHWVRQAPGKGLEWVAVISYDGSNKYYVDSVKGRFTISRDNSKNTLYLQMNSLRAEDTAVYYCRWAYWELLPDYYYGMDVWGQGTTVTVSSASGGSGDKTHTCPPCPAPELLGGPSVFLFPPKPKDTLMISRTPEVTCVVVDVSHEDPEVKFNWYVDGVEVHNAKTKPREEQYNSYVVSVLTVLHQDWLNGKEYKCKVSNKALPAPIEKTISKAKGQPREPQVYTLPPSRDELTKNQVSLTCLVKGFYPSDIAVEWESNGQPENNYKTTPPVLDSDGSFFKKLTVDKSRWQQGNVFSCSVLHEALHSHYTQKSLSLSPG

SEQ ID NO: 191 - protein, 722 aa, synthetic construct
  REGION 1..722: note = MX829 - A19-61xA23-58H/A23-58L93VGLTG
DIQMTQSPSSVSASVGDRVIITCRASQGISSWLAWYQQKPGKAPKVLIYDASSLQSGVPSRFSGSGYGTDFTLTISSLQPEDSATYYCQQAKSFPITFGQGTRLEIKGGSSGEIVLTQSPGTLSLSPGERATLSCRASQSVSSSYLAWYQQKPGQAPRLLIYSASSRATGIPDRFSGSGSGTDFTLTISRLEPEDFAVYFCQQYVGLTGWTFGQGTKVEIKGGGGSGGSGSGGGGSASGSGQMQLVQSGPEVKKPGTSVKVSCKASGFTFTSSAVQWVRQRQRLEWIGWIVVGSGNTNYAQKFQERVTITRDMSTSTAYMELSSLRSEDTAVYYCAAPNCSNVVCYDGFDIWGQGTMVTVSSGGSSGQVQLVESGGGVVQPGRSLRLSCAASGFTFSSYAFHWVRQAPGKGLEWVAVISYDGSNQYYADSVKGRFTISRDNSKNTLYLQMNSLRADDTAVYYCARDLAIAVAGTWHYYNGMDVWGQGTTVTVSSASGGSGDKTHTCPPCPAPELLGGPSVFLFPPKPKDTLMISRTPEVTCVVVDVSHEDPEVKFNWYVDGVEVHNAKTKPREEQYNSYVVSVLTVLHQDWLNGKEYKCKVSNKALPAPIEKTISKAKGQPREPQVYTLPPSRDELTKNQVSLTCLVKGFYPSDIAVEWESNGQPENNYKTTPPVLDSDGSFFKKLTVDKSRWQQGNVFSCSVLHEALHSHYTQKSLSLSPG

SEQ ID NO: 192 - protein, 722 aa, synthetic construct
  REGION 1..722: note = MX830 - A19-46xA23-58H/A23-58L94GLTG
QTVVTQEPSFSVSPGGTVTLTCGLSSGSVSTAYFPSWYQQTPGQAPRTLIYGTNTRSSGVPDRFSGSILGNKAALTITGAQADDESDYYCVLYMGRGIVVFGGGTKLTVLGGSSGEIVLTQSPGTLSLSPGERATLSCRASQSVSSSYLAWYQQKPGQAPRLLIYSASSRATGIPDRFSGSGSGTDFTLTISRLEPEDFAVYFCQQYGGLTGWTFGQGTKVEIKGGGGSGGSGSGGGGSASGSGQMQLVQSGPEVKKPGTSVKVSCKASGFTFTSSAVQWVRQRQRLEWIGWIVVGSGNTNYAQKFQERVTITRDMSTSTAYMELSSLRSEDTAVYYCAAPNCSNVVCYDGFDIWGQGTMVTVSSGGSSGQVQLVESGGGVVQPGRSLRLSCAASGFTLSSYGMHWVRQAPGKGLEWVAVISYDGSNKYYVDSVKGRFTISRDNSKNTLYLQMNSLRAEDTAVYYCRWAYWELLPDYYYGMDVWGQGTTVTVSSASGGSGDKTHTCPPCPAPELLGGPSVFLFPPKPKDTLMISRTPEVTCVVVDVSHEDPEVKFNWYVDGVEVHNAKTKPREEQYNSYVVSVLTVLHQDWLNGKEYKCKVSNKALPAPIEKTISKAKGQPREPQVYTLPPSRDELTKNQVSLTCLVKGFYPSDIAVEWESNGQPENNYKTTPPVLDSDGSFFKKLTVDKSRWQQGNVFSCSVLHEALHSHYTQKSLSLSPG

SEQ ID NO: 193 - protein, 722 aa, synthetic construct
  REGION 1..722: note = MX831 - A19-61xA23-58H/A23-58L94GLTG
DIQMTQSPSSVSASVGDRVIITCRASQGISSWLAWYQQKPGKAPKVLIYDASSLQSGVPSRFSGSGYGTDFTLTISSLQPEDSATYYCQQAKSFPITFGQGTRLEIKGGSSGEIVLTQSPGTLSLSPGERATLSCRASQSVSSSYLAWYQQKPGQAPRLLIYSASSRATGIPDRFSGSGSGTDFTLTISRLEPEDFAVYFCQQYGGLTGWTFGQGTKVEIKGGGGSGGSGSGGGGSASGSGQMQLVQSGPEVKKPGTSVKVSCKASGFTFTSSAVQWVRQRQRLEWIGWIVVGSGNTNYAQKFQERVTITRDMSTSTAYMELSSLRSEDTAVYYCAAPNCSNVVCYDGFDIWGQGTMVTVSSGGSSGQVQLVESGGGVVQPGRSLRLSCAASGFTFSSYAFHWVRQAPGKGLEWVAVISYDGSNQYYADSVKGRFTISRDNSKNTLYLQMNSLRADDTAVYYCARDLAIAVAGTWHYYNGMDVWGQGTTVTVSSASGGSGDKTHTCPPCPAPELLGGPSVFLFPPKPKDTLMISRTPEVTCVVVDVSHEDPEVKFNWYVDGVEVHNAKTKPREEQYNSYVVSVLTVLHQDWLNGKEYKCKVSNKALPAPIEKTISKAKGQPREPQVYTLPPSRDELTKNQVSLTCLVKGFYPSDIAVEWESNGQPENNYKTTPPVLDSDGSFFKKLTVDKSRWQQGNVFSCSVLHEALHSHYTQKSLSLSPG

SEQ ID NO: 194 - protein, 722 aa, synthetic construct
  REGION 1..722: note = MX834 - A19-46   A23-58H/A23-58L93VGLTG
QTVVTQEPSFSVSPGGTVTLTCGLSSGSVSTAYFPSWYQQTPGQAPRTLIYGTNTRSSGVPDRFSGSILGNKAALTITGAQADDESDYYCVLYMGRGIVVFGGGTKLTVLGGSSGEIVLTQSPGTLSLSPGERATLSCRASQSVSSSYLAWYQQKPGQAPRLLIYSASSRATGIPDRFSGSGSGTDFTLTISRLEPEDFAVYFCQQYVGLTGWTFGQGTKVEIKGGGGSGGSGSGGGGSASGSGQMQLVQSGPEVKKPGTSVKVSCKASGFTFTSSAVQWVRQRQRLEWIGWIVVGSGNTNYAQKFQERVTITRDMSTSTAYMELSSLRSEDTAVYYCAAPNCSNVVCYDGFDIWGQGTMVTVSSGGSSGQVQLVESGGGVVQPGRSLRLSCAASGFTLSSYGMHWVRQAPGKGLEWVAVISYDGSNKYYVDSVKGRFTISRDNSKNTLYLQMNSLRAEDTAVYYCRWAYWELLPDYYYGMDVWGQGTTVTVSSASGGSGDKTHTCPPCPAPELLGGPSVFLFPPKPKDTLMISRTPEVTCVVVDVSHEDPEVKFNWYVDGVEVHNAKTKPREEQYNSYVVSVLTVLHQDWLNGKEYKCKVSNKALPAPIEKTISKAKGQPREPQVYTLPPCRDELTKNQVSLWCLVKGFYPSDIAVEWESNGQPENNYKTTPPVLDSDGSFFKKLTVDKSRWQQGNVFSCSVLHEALHSHYTQKSLSLSPG

SEQ ID NO: 195 - protein, 722 aa, synthetic construct; identical to SEQ ID NO: 194
  REGION 1..722: note = MX834 - A23-58H/A23-58L93VGLTG   A19-61

SEQ ID NO: 196 - protein, 722 aa, synthetic construct; identical to SEQ ID NO: 194
  REGION 1..722: note = MX837 - A19-46   A23-58H/A23-58L93VGLTG

SEQ ID NO: 197 - protein, 724 aa, synthetic construct
  REGION 1..724: note = MX837 - A23-58H/A23-58L93VGLTG
DIQMTQSPSSVSASVGDRVIITCRASQGISSWLAWYQQKPGKAPKVLIYDASSLQSGVPSRFSGSGYGTDFTLTISSLQPEDSATYYCQQAKSFPITFGQGTRLEIKGGSSGEIVLTQSPGTLSLSPGERATLSCRASQSVSSSYLAWYQQKPGQAPRLLIYSASSRATGIPDRFSGSGSGTDFTLTISRLEPEDFAVYFCQQYVGLTGWTFGQGTKVEIKGGGGSGGSGSGGGGSASGSGQMQLVQSGPEVKKPGTSVKVSCKASGFTFTSSAVQWVRQRQRLEWIGWIVVGSGNTNYAQKFQERVTITRDMSTSTAYMELSSLRSEDTAVYYCAAPNCSNVVCYDGFDIWGQGTMVTVSSGGSSGQVQLVESGGGVVQPGRSLRLSCAASGFTFSSYAFHWVRQAPGKGLEWVAVISYDGSNQYYADSVKGRFTISRDNSKNTLYLQMNSLRADDTAVYYCARDLAIAVAGTWHYYNGMDVWGQGTTVTVSSASGGSGDKTHTCPPCPAPELLGGPSVFLFPPKPKDTLMISRTPEVTCVVVDVSHEDPEVKFNWYVDGVEVHNAKTKPREEQYNSYVVSVLTVLHQDWLNGKEYKCKVSNKALPAPIEKTISKAKGQPREPQVCTLPPSRDELTKNQVSLSCAVKGFYPSDIAVEWESNGQPENNYKTTPPVLDSDGSFFLVSKLTVDKSRWQQGNVFSCSVLHEALHSHYTQKSLSLSPG

SEQ ID NO: 198 - protein, 722 aa, synthetic construct
  REGION 1..722: note = MX835 - A19-46   A23-58H/A23-58L94GLTG
QTVVTQEPSFSVSPGGTVTLTCGLSSGSVSTAYFPSWYQQTPGQAPRTLIYGTNTRSSGVPDRFSGSILGNKAALTITGAQADDESDYYCVLYMGRGIVVFGGGTKLTVLGGSSGEIVLTQSPGTLSLSPGERATLSCRASQSVSSSYLAWYQQKPGQAPRLLIYSASSRATGIPDRFSGSGSGTDFTLTISRLEPEDFAVYFCQQYGGLTGWTFGQGTKVEIKGGGGSGGSGSGGGGSASGSGQMQLVQSGPEVKKPGTSVKVSCKASGFTFTSSAVQWVRQRQRLEWIGWIVVGSGNTNYAQKFQERVTITRDMSTSTAYMELSSLRSEDTAVYYCAAPNCSNVVCYDGFDIWGQGTMVTVSSGGSSGQVQLVESGGGVVQPGRSLRLSCAASGFTLSSYGMHWVRQAPGKGLEWVAVISYDGSNKYYVDSVKGRFTISRDNSKNTLYLQMNSLRAEDTAVYYCRWAYWELLPDYYYGMDVWGQGTTVTVSSASGGSGDKTHTCPPCPAPELLGGPSVFLFPPKPKDTLMISRTPEVTCVVVDVSHEDPEVKFNWYVDGVEVHNAKTKPREEQYNSYVVSVLTVLHQDWLNGKEYKCKVSNKALPAPIEKTISKAKGQPREPQVYTLPPCRDELTKNQVSLWCLVKGFYPSDIAVEWESNGQPENNYKTTPPVLDSDGSFFKKLTVDKSRWQQGNVFSCSVLHEALHSHYTQKSLSLSPG

SEQ ID NO: 199 - protein, 724 aa, synthetic construct
  REGION 1..724: note = MX835 - A23-58H/A23-58L94GLTG   A19-61
EIVLTQSPGTLSLSPGERATLSCRASQSVSSSYLAWYQQKPGQAPRLLIYSASSRATGIPDRFSGSGSGTDFTLTISRLEPEDFAVYFCQQYGGLTGWTFGQGTKVEIKGGSSGDIQMTQSPSSVSASVGDRVIITCRASQGISSWLAWYQQKPGKAPKVLIYDASSLQSGVPSRFSGSGYGTDFTLTISSLQPEDSATYYCQQAKSFPITFGQGTRLEIKGGGGSGGSGSGGGGSASGSGQVQLVESGGGVVQPGRSLRLSCAASGFTFSSYAFHWVRQAPGKGLEWVAVISYDGSNQYYADSVKGRFTISRDNSKNTLYLQMNSLRADDTAVYYCARDLAIAVAGTWHYYNGMDVWGQGTTVTVSSGGSSGQMQLVQSGPEVKKPGTSVKVSCKASGFTFTSSAVQWVRQRQRLEWIGWIVVGSGNTNYAQKFQERVTITRDMSTSTAYMELSSLRSEDTAVYYCAAPNCSNVVCYDGFDIWGQGTMVTVSSASGGSGDKTHTCPPCPAPELLGGPSVFLFPPKPKDTLMISRTPEVTCVVVDVSHEDPEVKFNWYVDGVEVHNAKTKPREEQYNSYVVSVLTVLHQDWLNGKEYKCKVSNKALPAPIEKTISKAKGQPREPQVCTLPPSRDELTKNQVSLSCAVKGFYPSDIAVEWESNGQPENNYKTTPPVLDSDGSFFLVSKLTVDKSRWQQGNVFSCSVLHEALHSHYTQKSLSLSPG

SEQ ID NO: 200 - protein, 722 aa, synthetic construct; identical to SEQ ID NO: 198
  REGION 1..722: note = MX838 - A19-46   A23-58H/A23-58L94GLTG

SEQ ID NO: 201 - protein, 724 aa, synthetic construct
  REGION 1..724: note = MX838 - A19-61   A23-58H/A23-58L94GLTG
DIQMTQSPSSVSASVGDRVIITCRASQGISSWLAWYQQKPGKAPKVLIYDASSLQSGVPSRFSGSGYGTDFTLTISSLQPEDSATYYCQQAKSFPITFGQGTRLEIKGGSSGEIVLTQSPGTLSLSPGERATLSCRASQSVSSSYLAWYQQKPGQAPRLLIYSASSRATGIPDRFSGSGSGTDFTLTISRLEPEDFAVYFCQQYGGLTGWTFGQGTKVEIKGGGGSGGSGSGGGGSASGSGQMQLVQSGPEVKKPGTSVKVSCKASGFTFTSSAVQWVRQRQRLEWIGWIVVGSGNTNYAQKFQERVTITRDMSTSTAYMELSSLRSEDTAVYYCAAPNCSNVVCYDGFDIWGQGTMVTVSSGGSSGQVQLVESGGGVVQPGRSLRLSCAASGFTFSSYAFHWVRQAPGKGLEWVAVISYDGSNQYYADSVKGRFTISRDNSKNTLYLQMNSLRADDTAVYYCARDLAIAVAGTWHYYNGMDVWGQGTTVTVSSASGGSGDKTHTCPPCPAPELLGGPSVFLFPPKPKDTLMISRTPEVTCVVVDVSHEDPEVKFNWYVDGVEVHNAKTKPREEQYNSYVVSVLTVLHQDWLNGKEYKCKVSNKALPAPIEKTISKAKGQPREPQVCTLPPSRDELTKNQVSLSCAVKGFYPSDIAVEWESNGQPENNYKTTPPVLDSDGSFFLVSKLTVDKSRWQQGNVFSCSVLHEALHSHYTQKSLSLSPG

SEQ ID NO: 202 - protein, 720 aa, synthetic construct
  REGION 1..720: note = A23-58H/L93VGLTG_A23-58H/L93VGLTG_IgG1 LS
EIVLTQSPGTLSLSPGERATLSCRASQSVSSSYLAWYQQKPGQAPRLLIYSASSRATGIPDRFSGSGSGTDFTLTISRLEPEDFAVYFCQQYVGLTGWTFGQGTKVEIKGGSSGEIVLTQSPGTLSLSPGERATLSCRASQSVSSSYLAWYQQKPGQAPRLLIYSASSRATGIPDRFSGSGSGTDFTLTISRLEPEDFAVYFCQQYVGLTGWTFGQGTKVEIKGGGGSGGSGSGGGGSASGSGQMQLVQSGPEVKKPGTSVKVSCKASGFTFTSSAVQWVRQRQRLEWIGWIVVGSGNTNYAQKFQERVTITRDMSTSTAYMELSSLRSEDTAVYYCAAPNCSNVVCYDGFDIWGQGTMVTVSSGGSSGQMQLVQSGPEVKKPGTSVKVSCKASGFTFTSSAVQWVRQARGQRLEWIGWIVVGSGNTNYAQKFQERVTITRDMSTSTAYMELSSLRSEDTAVYYCAAPNCSNVVCYDGFDIWGQGTMVTVSSASGGSGDKTHTCPPCPAPELLGGPSVFLFPPKPKDTLMISRTPEVTCVVVDVSHEDPEVKFNWYVDGVEVHNAKTKPREEQYNSYVVSVLTVLHQDWLNGKEYKCKVSNKALPAPIEKTISKAKGQPREPQVYTLPPSRDELTKNQVSLTCLVKGFYPSDIAVEWESNGQPENNYKTTPPVLDSDGSFFKKLTVDKSRWQQGNVFSCSVLHEALHSHYTQKSLSLSPG

SEQ ID NO: 203 - protein, 728 aa, synthetic construct
  REGION 1..728: note = A19-61_A19-61_IgG1 LS
DIQMTQSPSSVSASVGDRVIITCRASQGISSWLAWYQQKPGKAPKVLIYDASSLQSGVPSRFSGSGYGTDFTLTISSLQPEDSATYYCQQAKSFPITFGQGTRLEIKGGSSGDIQMTQSPSSVSASVGDRVIITCRASQGISSWLAWYQQKPGKAPKVLIYDASSLQSGVPSRFSGSGYGTDFTLTISSLQPEDSATYYCQQAKSFPITFGQGTRLEIKGGGGSGGSGSGGGGSASGSGQVQLVESGGGVVQPGRSLRLSCAASGFTFSSYAFHWVRQAPGKGLEWVAVISYDGSNQYYADSVKGRFTISRDNSKNTLYLQMNSLRADDTAVYYCARDLAIAVAGTWHYYNGMDVWGQGTTVTVSSGGSSGQVQLVESGGGVVQPGRSLRLSCAASGFTFSSYAFHWVRQAPGKGLEWVAVISYDGSNQYYADSVKGRFTISRDNSKNTLYLQMNSLRADDTAVYYCARDLAIAVAGTWHYYNGMDVWGQGTTVTVSSASGGSGDKTHTCPPCPAPELLGGPSVFLFPPKPKDTLMISRTPEVTCVVVDVSHEDPEVKFNWYVDGVEVHNAKTKPREEQYNSYVVSVLTVLHQDWLNGKEYKCKVSNKALPAPIEKTISKAKGQPREPQVYTLPPSRDELTKNQVSLTCLVKGFYPSDIAVEWESNGQPENNYKTTPPVLDSDGSFFLYSKLTVDKSRWQQGNVFSCSVLHEALHSHYTQKSLSLSPG

SEQ ID NO: 204 - protein, 728 aa, synthetic construct
  REGION 1..728: note = A19-46_A19-46_IgG1 LS
QTVVTQEPSFSVSPGGTVTLTCGLSSGSVSTAYFPSWYQQTPGQAPRTLIYGTNTRSSGVPDRFSGSILGNKAALTITGAQADDESDYYCVLYMGRGIVVFGGGTKLTVLGGSSGQTVVTQEPSFSVSPGGTVTLTCGLSSGSVSTAYFPSWYQQTPGQAPRTLIYGTNTRSSGVPDRFSGSILGNKAALTITGAQADDESDYYCVLYMGRGIVVFGGGTKLTVLGGGGSGGSGSGGGGSASGSGQVQLVESGGGVVQPGRSLRLSCAASGFTLSSYGMHWVRQAPGKGLEWVAVISYDGSNKYYVDSVKGRFTISRDNSKNTLYLQMNSLRAEDTAVYYCARGWAYWELLPDYYYGMDVWGQGTTVTVSSGGSSGQVQLVESGGGVVQPGRSLRLSCAASGFTLSSYGMHWVRQAPGKGLEWVAVISYDGSNKYYVDSVKGRFTISRDNSKNTLYLQMNSLRAEDTAVYYCRWAYWELLPDYYYGMDVWGQGTTVTVSSASGGSGDKTHTCPPCPAPELLGGPSVFLFPPKPKDTLMISRTPEVTCVVVDVSHEDPEVKFNWYVDGVEVHNAKTKPREEQYNSYVVSVLTVLHQDWLNGKEYKCKVSNKALPAPIEKTISKAKGQPREPQVYTLPPSRDELTKNQVSLTCLVKGFYPSDIAVEWESNGQPENNYKTTPPVLDSDGSFFKKLTVDKSRWQQGNVFSCSVLHEALHSHYTQKSLSLSPG

SEQ ID NO: 205 - protein, 714 aa, synthetic construct
  REGION 1..714: note = LY-CoV1404_LY-CoV1404_IgG1 LS
QSALTQPASVSGSPGQSITISCTATSSDVGDYNYVSWYQQHPGKAPKLMIFEVSDRPSGISNRFSGSKSGNTASLTISGLQAEDEADYYCSSYTTSSAVFGGGTKLTVLGGSSGQSALTQPASVSGSPGQSITISCTATSSDVGDYNYVSWYQQHPGKAPKLMIFEVSDRPSGISNRFSGSKSGNTASLTISGLQAEDEADYYCSSYTTSSAVFGGGTKLTVLGGGGSGGSGSGGGGSASGSGQITLKESGPTLVKPTQTLTLTCTFSGFSLSISGVGVGWLRQPPGKALEWLALIYWDDDKRYSPSLKSRLTISKDTSKNQVVLKMTNIDPVDTATYYCAHHSISTIFDHWGQGTLVTVSSGGSSGQITLKESGPTLVKPTQTLTLTCTFSGFSLSISGVGVGWLRQPPGKALEWLALIYWDDDKRYSPSLKSRLTISKDTSKNQVVLKMTNIDPVDTATYYCAHHSISTIFDHWGQGTLVTVSSASGGSGDKTHTCPPCPAPELLGGPSVFLFPPKPKDTLMISRTPEVTCVVVDVSHEDPEVKFNWYVDGVEVHNAKTKPREEQYNSYVVSVLTVLHQDWLNGKEYKCKVSNKALPAPIEKTISKAKGQPREPQVYTLPPSRDELTKNQVSLTCLVKGFYPSDIAVEWESNGQPENNYKTTPPVLDSDGSFFKKLTVDKSRWQQGNVFSCSVLHEALHSHYTQKSLSLSPG

SEQ ID NO: 206 - protein, 722 aa, synthetic construct
  REGION 1..722: note = A23-58H/L93VGLTG_A19-46_IgG1 LS
EIVLTQSPGTLSLSPGERATLSCRASQSVSSSYLAWYQQKPGQAPRLLIYSASSRATGIPDRFSGSGSGTDFTLTISRLEPEDFAVYFCQQYVGLTGWTFGQGTKVEIKGGSSGQTVVTQEPSFSVSPGGTVTLTCGLSSGSVSTAYFPSWYQQTPGQAPRTLIYGTNTRSSGVPDRFSGSILGNKAALTITGAQADDESDYYCVLYMGRGIVVFGGGTKLTVLGGGGSGGSGSGGGGSASGSGQVQLVESGGGVVQPGRSLRLSCAASGFTLSSYGMHWVRQAPGKGLEWVAVISYDGSNKYYVDSVKGRFTISRDNSKNTLYLQMNSLRAEDTAVYYCRWAYWELLPDYYYGMDVWGQGTTVTVSSGGSSGQMQLVQSGPEVKKPGTSVKVSCKASGFTFTSSAVQWVRQRQRLEWIGWIVVGSGNTNYAQKFQERVTITRDMSTSTAYMELSSLRSEDTAVYYCAAPNCSNVVCYDGFDIWGQGTMVTVSSASGGSGDKTHTCPPCPAPELLGGPSVFLFPPKPKDTLMISRTPEVTCVVVDVSHEDPEVKFNWYVDGVEVHNAKTKPREEQYNSYVVSVLTVLHQDWLNGKEYKCKVSNKALPAPIEKTISKAKGQPREPQVYTLPPSRDELTKNQVSLTCLVKGFYPSDIAVEWESNGQPENNYKTTPPVLDSDGSFFKKLTVDKSRWQQGNVFSCSVLHEALHSHYTQKSLSLSPG

SEQ ID NO: 207 - protein, 722 aa, synthetic construct
  REGION 1..722: note = A23-58H/L93VGLTG_A19-46 X A19-46_A23-58H/L93VGLTG_IgG1 KiH LS - A23-58H/L93VGLTG_A19-46_IgG1 KCC LS
EIVLTQSPGTLSLSPGERATLSCRASQSVSSSYLAWYQQKPGQAPRLLIYSASSRATGIPDRFSGSGSGTDFTLTISRLEPEDFAVYFCQQYVGLTGWTFGQGTKVEIKGGSSGQTVVTQEPSFSVSPGGTVTLTCGLSSGSVSTAYFPSWYQQTPGQAPRTLIYGTNTRSSGVPDRFSGSILGNKAALTITGAQADDESDYYCVLYMGRGIVVFGGGTKLTVLGGGGSGGSGSGGGGSASGSGQVQLVESGGGVVQPGRSLRLSCAASGFTLSSYGMHWVRQAPGKGLEWVAVISYDGSNKYYVDSVKGRFTISRDNSKNTLYLQMNSLRAEDTAVYYCRWAYWELLPDYYYGMDVWGQGTTVTVSSGGSSGQMQLVQSGPEVKKPGTSVKVSCKASGFTFTSSAVQWVRQRQRLEWIGWIVVGSGNTNYAQKFQERVTITRDMSTSTAYMELSSLRSEDTAVYYCAAPNCSNVVCYDGFDIWGQGTMVTVSSASGGSGDKTHTCPPCPAPELLGGPSVFLFPPKPKDTLMISRTPEVTCVVVDVSHEDPEVKFNWYVDGVEVHNAKTKPREEQYNSYVVSVLTVLHQDWLNGKEYKCKVSNKALPAPIEKTISKAKGQPREPQVYTLPPCRDELTKNQVSLWCLVKGFYPSDIAVEWESNGQPENNYKTTPPVLDSDGSFFKKLTVDKSRWQQGNVFSCSVLHEALHSHYTQKSLSLSPG

SEQ ID NO: 208 - protein, 724 aa, synthetic construct
  REGION 1..724: note = A23-58H/L93VGLTG_A19-46 X A19-46_A23 -58H/L93VGLTG_IgG1 KiH LS - MD15_A19-46_A23-58H/L93VGLTG_IgG1 Hcc LS
QTVVTQEPSFSVSPGGTVTLTCGLSSGSVSTAYFPSWYQQTPGQAPRTLIYGTNTRSSGVPDRFSGSILGNKAALTITGAQADDESDYYCVLYMGRGIVVFGGGTKLTVLGGSSGEIVLTQSPGTLSLSPGERATLSCRASQSVSSSYLAWYQQKPGQAPRLLIYSASSRATGIPDRFSGSGSGTDFTLTISRLEPEDFAVYFCQQYVGLTGWTFGQGTKVEIKGGGGSGGSGSGGGGSASGSGQMQLVQSGPEVKKPGTSVKVSCKASGFTFTSSAVQWVRQRQRLEWIGWIVVGSGNTNYAQKFQERVTITRDMSTSTAYMELSSLRSEDTAVYYCAAPNCSNVVCYDGFDIWGQGTMVTVSSGGSSGQVQLVESGGGVVQPGRSLRLSCAASGFTLSSYGMHWVRQAPGKGLEWVAVISYDGSNKYYVDSVKGRFTISRDNSKNTLYLQMNSLRAEDTAVYYCRWAYWELLPDYYYGMDVWGQGTTVTVSSASGGSGDKTHTCPPCPAPELLGGPSVFLFPPKPKDTLMISRTPEVTCVVVDVSHEDPEVKFNWYVDGVEVHNAKTKPREEQYNSYVVSVLTVLHQDWLNGKEYKCKVSNKALPAPIEKTISKAKGQPREPQVCTLPPSRDELTKNQVSLSCAVKGFYPSDIAVEWESNGQPENNYKTTPPVLDSDGSFFLVSKLTVDKSRWQQGNVFSCSVLHEALHSHYTQKSLSLSPG

SEQ ID NO: 209 - protein, 722 aa, synthetic construct
  REGION 1..722: note = A23-58H/L93VGLTG_A19-61_IgG1 LS
EIVLTQSPGTLSLSPGERATLSCRASQSVSSSYLAWYQQKPGQAPRLLIYSASSRATGIPDRFSGSGSGTDFTLTISRLEPEDFAVYFCQQYVGLTGWTFGQGTKVEIKGGSSGDIQMTQSPSSVSASVGDRVIITCRASQGISSWLAWYQQKPGKAPKVLIYDASSLQSGVPSRFSGSGYGTDFTLTISSLQPEDSATYYCQQAKSFPITFGQGTRLEIKGGGGSGGSGSGGGGSASGSGQVQLVESGGGVVQPGRSLRLSCAASGFTFSSYAFHWVRQAPGKGLEWVAVISYDGSNQYYADSVKGRFTISRDNSKNTLYLQMNSLRADDTAVYYCARDLAIAVAGTWHYYNGMDVWGQGTTVTVSSGGSSGQMQLVQSGPEVKKPGTSVKVSCKASGFTFTSSAVQWVRQRQRLEWIGWIVVGSGNTNYAQKFQERVTITRDMSTSTAYMELSSLRSEDTAVYYCAAPNCSNVVCYDGFDIWGQGTMVTVSSASGGSGDKTHTCPPCPAPELLGGPSVFLFPPKPKDTLMISRTPEVTCVVVDVSHEDPEVKFNWYVDGVEVHNAKTKPREEQYNSYVVSVLTVLHQDWLNGKEYKCKVSNKALPAPIEKTISKAKGQPREPQVYTLPPSRDELTKNQVSLTCLVKGFYPSDIAVEWESNGQPENNYKTTPPVLDSDGSFFKKLTVDKSRWQQGNVFSCSVLHEALHSHYTQKSLSLSPG

SEQ ID NO: 210 - protein, 722 aa, synthetic construct
  REGION 1..722: note = A23-58H/L93VGLTG_A19-61 X A19-61_A23-58H/L93VGLTG_IgG1 KiH LS - MD17_ A23-58H/L93VGLTG_A19-61_IgG1 Kcc LS
EIVLTQSPGTLSLSPGERATLSCRASQSVSSSYLAWYQQKPGQAPRLLIYSASSRATGIPDRFSGSGSGTDFTLTISRLEPEDFAVYFCQQYVGLTGWTFGQGTKVEIKGGSSGDIQMTQSPSSVSASVGDRVIITCRASQGISSWLAWYQQKPGKAPKVLIYDASSLQSGVPSRFSGSGYGTDFTLTISSLQPEDSATYYCQQAKSFPITFGQGTRLEIKGGGGSGGSGSGGGGSASGSGQVQLVESGGGVVQPGRSLRLSCAASGFTFSSYAFHWVRQAPGKGLEWVAVISYDGSNQYYADSVKGRFTISRDNSKNTLYLQMNSLRADDTAVYYCARDLAIAVAGTWHYYNGMDVWGQGTTVTVSSGGSSGQMQLVQSGPEVKKPGTSVKVSCKASGFTFTSSAVQWVRQRQRLEWIGWIVVGSGNTNYAQKFQERVTITRDMSTSTAYMELSSLRSEDTAVYYCAAPNCSNVVCYDGFDIWGQGTMVTVSSASGGSGDKTHTCPPCPAPELLGGPSVFLFPPKPKDTLMISRTPEVTCVVVDVSHEDPEVKFNWYVDGVEVHNAKTKPREEQYNSYVVSVLTVLHQDWLNGKEYKCKVSNKALPAPIEKTISKAKGQPREPQVYTLPPCRDELTKNQVSLWCLVKGFYPSDIAVEWESNGQPENNYKTTPPVLDSDGSFFKKLTVDKSRWQQGNVFSCSVLHEALHSHYTQKSLSLSPG

SEQ ID NO: 211 - protein, 724 aa, synthetic construct; identical to SEQ ID NO: 197
  REGION 1..724: note = A23-58H/L93VGLTG_A19-61 X A19-61_A23-58H/L93VGLTG_IgG1 KiH LS - MD18_ A19-61_A23-58H/L93VGLTG_IgG1 Hcc LS

SEQ ID NO: 212 - protein, 722 aa, synthetic construct; identical to SEQ ID NO: 207
  REGION 1..722: note = A23-58H/L93VGLTG_A19-46 X A23-58H/L93VGLTG_A19-61_IgG1 KiH LS - MD14_ A23-58H/L93VGLTG_A19-46_IgG1 KCC LS

SEQ ID NO: 213 - protein, 724 aa, synthetic construct
  REGION 1..724: note = A23-58H/L93VGLTG_A19-46 X A23-58H/L93VGLTG_A19-61_IgG1 KiH LS - MD19_ A23-58H/L93VGLTG_A19-61_IgG1 Hcc LS
EIVLTQSPGTLSLSPGERATLSCRASQSVSSSYLAWYQQKPGQAPRLLIYSASSRATGIPDRFSGSGSGTDFTLTISRLEPEDFAVYFCQQYVGLTGWTFGQGTKVEIKGGSSGDIQMTQSPSSVSASVGDRVIITCRASQGISSWLAWYQQKPGKAPKVLIYDASSLQSGVPSRFSGSGYGTDFTLTISSLQPEDSATYYCQQAKSFPITFGQGTRLEIKGGGGSGGSGSGGGGSASGSGQVQLVESGGGVVQPGRSLRLSCAASGFTFSSYAFHWVRQAPGKGLEWVAVISYDGSNQYYADSVKGRFTISRDNSKNTLYLQMNSLRADDTAVYYCARDLAIAVAGTWHYYNGMDVWGQGTTVTVSSGGSSGQMQLVQSGPEVKKPGTSVKVSCKASGFTFTSSAVQWVRQRQRLEWIGWIVVGSGNTNYAQKFQERVTITRDMSTSTAYMELSSLRSEDTAVYYCAAPNCSNVVCYDGFDIWGQGTMVTVSSASGGSGDKTHTCPPCPAPELLGGPSVFLFPPKPKDTLMISRTPEVTCVVVDVSHEDPEVKFNWYVDGVEVHNAKTKPREEQYNSYVVSVLTVLHQDWLNGKEYKCKVSNKALPAPIEKTISKAKGQPREPQVCTLPPSRDELTKNQVSLSCAVKGFYPSDIAVEWESNGQPENNYKTTPPVLDSDGSFFLVSKLTVDKSRWQQGNVFSCSVLHEALHSHYTQKSLSLSPG

SEQ ID NO: 214 - protein, 722 aa, synthetic construct; identical to SEQ ID NO: 207
  REGION 1..722: note = A23-58H/L93VGLTG_A19-46 X A19-61_A23-58H/L93VGLTG_IgG1 KiH LS - MD14_ A23-58H/L93VGLTG_A19-46_IgG1 KCC LS

SEQ ID NO: 215 - protein, 724 aa, synthetic construct; identical to SEQ ID NO: 197
  REGION 1..724: note = A23-58H/L93VGLTG_A19-46 X A19-61_A23-58H/L93VGLTG_IgG1 KiH LS - MD18_ A19-61_A23-58H/L93VGLTG_IgG1 Hcc LS

SEQ ID NO: 216 - protein, 726 aa, synthetic construct
  REGION 1..726: note = A19-46_A19-61 X A23-58H/L93VGLTG_A19-61_IgG1 KiH LS - MD20_ A19-46_A19-61_IgG1 Kcc LS
QTVVTQEPSFSVSPGGTVTLTCGLSSGSVSTAYFPSWYQQTPGQAPRTLIYGTNTRSSGVPDRFSGSILGNKAALTITGAQADDESDYYCVLYMGRGIVVFGGGTKLTVLGGSSGDIQMTQSPSSVSASVGDRVIITCRASQGISSWLAWYQQKPGKAPKVLIYDASSLQSGVPSRFSGSGYGTDFTLTISSLQPEDSATYYCQQAKSFPITFGQGTRLEIKGGGGSGGSGSGGGGSASGSGQVQLVESGGGVVQPGRSLRLSCAASGFTFSSYAFHWVRQAPGKGLEWVAVISYDGSNQYYADSVKGRFTISRDNSKNTLYLQMNSLRADDTAVYYCARDLAIAVAGTWHYYNGMDVWGQGTTVTVSSGGSSGQVQLVESGGGVVQPGRSLRLSCAASGFTLSSYGMHWVRQAPGKGLEWVAVISYDGSNKYYVDSVKGRFTISRDNSKNTLYLQMNSLRAEDTAVYYCRWAYWELLPDYYYGMDVWGQGTTVTVSSASGGSGDKTHTCPPCPAPELLGGPSVFLFPPKPKDTLMISRTPEVTCVVVDVSHEDPEVKFNWYVDGVEVHNAKTKPREEQYNSYVVSVLTVLHQDWLNGKEYKCKVSNKALPAPIEKTISKAKGQPREPQVYTLPPCRDELTKNQVSLWCLVKGFYPSDIAVEWESNGQPENNYKTTPPVLDSDGSFFKKLTVDKSRWQQGNVFSCSVLHEALHSHYTQKSLSLSPG

SEQ ID NO: 217 - protein, 724 aa, synthetic construct; identical to SEQ ID NO: 213
  REGION 1..724: note = A19-46_A19-61 X A23-58H/L93VGLTG_A19-61_IgG1 KiH LS - MD19_ A23-58H/L93VGLTG_A19-61_IgG1 Hcc LS

SEQ ID NO: 218 - protein, 726 aa, synthetic construct; identical to SEQ ID NO: 216
  REGION 1..726: note = A19-46_A19-61 X A19-61_A23-58H/L93VGLTG_IgG1 KiH LS - MD20_ A19-46_A19-61_IgG1 Kcc LS

SEQ ID NO: 219 - protein, 724 aa, synthetic construct; identical to SEQ ID NO: 197
  REGION 1..724: note = A19-46_A19-61 X A19-61_A23-58H/L93VGLTG_IgG1 KiH LS - MD18_ A19-61_A23-58H/L93VGLTG_IgG1 Hcc LS

SEQ ID NO: 220 - protein, 722 aa, synthetic construct; identical to SEQ ID NO: 194
  REGION 1..722: note = A19-46_A23-58H/L93VGLTG X A19-46_A19-61_IgG1 KiH LS - MD21_ A19-46_A23-58H/L93VGLTG_IgG1 Kcc LS

SEQ ID NO: 221 - protein, 728 aa, synthetic construct
  REGION 1..728: note = A19-46_A23-58H/L93VGLTG X A19-46_A19-61_IgG1 KiH LS - MD22_ A19-46_A19-61_IgG1 Hcc LS
QTVVTQEPSFSVSPGGTVTLTCGLSSGSVSTAYFPSWYQQTPGQAPRTLIYGTNTRSSGVPDRFSGSILGNKAALTITGAQADDESDYYCVLYMGRGIVVFGGGTKLTVLGGSSGDIQMTQSPSSVSASVGDRVIITCRASQGISSWLAWYQQKPGKAPKVLIYDASSLQSGVPSRFSGSGYGTDFTLTISSLQPEDSATYYCQQAKSFPITFGQGTRLEIKGGGGSGGSGSGGGGSASGSGQVQLVESGGGVVQPGRSLRLSCAASGFTFSSYAFHWVRQAPGKGLEWVAVISYDGSNQYYADSVKGRFTISRDNSKNTLYLQMNSLRADDTAVYYCARDLAIAVAGTWHYYNGMDVWGQGTTVTVSSGGSSGQVQLVESGGGVVQPGRSLRLSCAASGFTLSSYGMHWVRQAPGKGLEWVAVISYDGSNKYYVDSVKGRFTISRDNSKNTLYLQMNSLRAEDTAVYYCRWAYWELLPDYYYGMDVWGQGTTVTVSSASGGSGDKTHTCPPCPAPELLGGPSVFLFPPKPKDTLMISRTPEVTCVVVDVSHEDPEVKFNWYVDGVEVHNAKTKPREEQYNSYVVSVLTVLHQDWLNGKEYKCKVSNKALPAPIEKTISKAKGQPREPQVCTLPPSRDELTKNQVSLSCAVKGFYPSDIAVEWESNGQPENNYKTTPPVLDSDGSFFLVSKLTVDKSRWQQGNVFSCSVLHEALHSHYTQKSLSLSPG

SEQ ID NO: 222 - protein, 722 aa, synthetic construct; identical to SEQ ID NO: 194
  REGION 1..722: note = A19-46_A23-58H/L93VGLTG X A19-61_A19-46_IgG1 KiH LS - MD21_ A19-46_A23-58H/L93VGLTG_IgG1 Kcc LS

SEQ ID NO: 223 - protein, 728 aa, synthetic construct
  REGION 1..728: note = A19-46_A23-58H/L93VGLTG X A19-61_A19-46_IgG1 KiH LS - MD23_ A19-61_A19-46_IgG1 Hcc LS
DIQMTQSPSSVSASVGDRVIITCRASQGISSWLAWYQQKPGKAPKVLIYDASSLQSGVPSRFSGSGYGTDFTLTISSLQPEDSATYYCQQAKSFPITFGQGTRLEIKGGSSGQTVVTQEPSFSVSPGGTVTLTCGLSSGSVSTAYFPSWYQQTPGQAPRTLIYGTNTRSSGVPDRFSGSILGNKAALTITGAQADDESDYYCVLYMGRGIVVFGGGTKLTVLGGGGSGGSGSGGGGSASGSGQVQLVESGGGVVQPGRSLRLSCAASGFTLSSYGMHWVRQAPGKGLEWVAVISYDGSNKYYVDSVKGRFTISRDNSKNTLYLQMNSLRAEDTAVYYCRWAYWELLPDYYYGMDVWGQGTTVTVSSGGSSGQVQLVESGGGVVQPGRSLRLSCAASGFTFSSYAFHWVRQAPGKGLEWVAVISYDGSNQYYADSVKGRFTISRDNSKNTLYLQMNSLRADDTAVYYCARDLAIAVAGTWHYYNGMDVWGQGTTVTVSSASGGSGDKTHTCPPCPAPELLGGPSVFLFPPKPKDTLMISRTPEVTCVVVDVSHEDPEVKFNWYVDGVEVHNAKTKPREEQYNSYVVSVLTVLHQDWLNGKEYKCKVSNKALPAPIEKTISKAKGQPREPQVCTLPPSRDELTKNQVSLSCAVKGFYPSDIAVEWESNGQPENNYKTTPPVLDSDGSFFLVSKLTVDKSRWQQGNVFSCSVLHEALHSHYTQKSLSLSPG

SEQ ID NO: 224 - protein, 722 aa, synthetic construct; identical to SEQ ID NO: 207
  REGION 1..722: note = A23-58H/L93VGLTG_A19-46 X A19-46_A19-61_IgG1 KiH LS - MD14_ A23-58H/L93VGLTG_A19-46_IgG1 KCC LS

SEQ ID NO: 225 - protein, 728 aa, synthetic construct; identical to SEQ ID NO: 221
  REGION 1..728: note = A23-58H/L93VGLTG_A19-46 X A19-46_A19-61_IgG1 KiH LS - MD22_ A19-46_A19-61_IgG1 IgG1 Hcc LS

SEQ ID NO: 226 - protein, 722 aa, synthetic construct; identical to SEQ ID NO: 207
  REGION 1..722: note = A23-58H/L93VGLTG_A19-46 X A19-61_A19-46_IgG1 KiH LS - MD14_ A23-58H/L93VGLTG_A19-46_IgG1 KCC LS

SEQ ID NO: 227 - protein, 728 aa, synthetic construct; identical to SEQ ID NO: 223
  REGION 1..728: note = A23-58H/L93VGLTG_A19-46 X A19-61_A19-46_IgG1 KiH LS - MD23_ A19-61_A19-46_IgG1 Hcc LS

SEQ ID NO: 228 - protein, 716 aa, synthetic construct
  REGION 1..716: note = MD24_ A23-58H/L93VGLTG_LY-CoV1404_IgG1 LS
EIVLTQSPGTLSLSPGERATLSCRASQSVSSSYLAWYQQKPGQAPRLLIYSASSRATGIPDRFSGSGSGTDFTLTISRLEPEDFAVYFCQQYVGLTGWTFGQGTKVEIKGGSSGQSALTQPASVSGSPGQSITISCTATSSDVGDYNYVSWYQQHPGKAPKLMIFEVSDRPSGISNRFSGSKSGNTASLTISGLQAEDEADYYCSSYTTSSAVFGGGTKLTVLGGGGSGGSGSGGGGSASGSGQITLKESGPTLVKPTQTLTLTCTFSGFSLSISGVGVGWLRQPPGKALEWLALIYWDDDKRYSPSLKSRLTISKDTSKNQVVLKMTNIDPVDTATYYCAHHSISTIFDHWGQGTLVTVSSGGSSGQMQLVQSGPEVKKPGTSVKVSCKASGFTFTSSAVQWVRQRQRLEWIGWIVVGSGNTNYAQKFQERVTITRDMSTSTAYMELSSLRSEDTAVYYCAAPNCSNVVCYDGFDIWGQGTMVTVSSASGGSGDKTHTCPPCPAPELLGGPSVFLFPPKPKDTLMISRTPEVTCVVVDVSHEDPEVKFNWYVDGVEVHNAKTKPREEQYNSYVVSVLTVLHQDWLNGKEYKCKVSNKALPAPIEKTISKAKGQPREPQVYTLPPSRDELTKNQVSLTCLVKGFYPSDIAVEWESNGQPENNYKTTPPVLDSDGSFFKKLTVDKSRWQQGNVFSCSVLHEALHSHYTQKSLSLSPG

SEQ ID NO: 229 - protein, 716 aa, synthetic construct
  REGION 1..716: note = LY-CoV1404_A23-58H/L93VGLTG_IgG1 LS
QSALTQPASVSGSPGQSITISCTATSSDVGDYNYVSWYQQHPGKAPKLMIFEVSDRPSGISNRFSGSKSGNTASLTISGLQAEDEADYYCSSYTTSSAVFGGGTKLTVLGGSSGEIVLTQSPGTLSLSPGERATLSCRASQSVSSSYLAWYQQKPGQAPRLLIYSASSRATGIPDRFSGSGSGTDFTLTISRLEPEDFAVYFCQQYVGLTGWTFGQGTKVEIKGGGGSGGSGSGGGGSASGSGQMQLVQSGPEVKKPGTSVKVSCKASGFTFTSSAVQWVRQRQRLEWIGWIVVGSGNTNYAQKFQERVTITRDMSTSTAYMELSSLRSEDTAVYYCAAPNCSNVVCYDGFDIWGQGTMVTVSSGGSSGQITLKESGPTLVKPTQTLTLTCTFSGFSLSISGVGVGWLRQPPGKALEWLALIYWDDDKRYSPSLKSRLTISKDTSKNQVVLKMTNIDPVDTATYYCAHHSISTIFDHWGQGTLVTVSSASGGSGDKTHTCPPCPAPELLGGPSVFLFPPKPKDTLMISRTPEVTCVVVDVSHEDPEVKFNWYVDGVEVHNAKTKPREEQYNSYVVSVLTVLHQDWLNGKEYKCKVSNKALPAPIEKTISKAKGQPREPQVYTLPPSRDELTKNQVSLTCLVKGFYPSDIAVEWESNGQPENNYKTTPPVLDSDGSFFKKLTVDKSRWQQGNVFSCSVLHEALHSHYTQKSLSLSPG

SEQ ID NO: 230 - protein, 716 aa, synthetic construct
  REGION 1..716: note = LY-CoV1404_A23-58H/L93VGLTG X A23-58H/L93VGLTG_LY-CoV1404_IgG1 KiH LS - MD26_LY-CoV1404_A23-58H/L93VGLTG_IgG1 Kcc LS
QSALTQPASVSGSPGQSITISCTATSSDVGDYNYVSWYQQHPGKAPKLMIFEVSDRPSGISNRFSGSKSGNTASLTISGLQAEDEADYYCSSYTTSSAVFGGGTKLTVLGGSSGEIVLTQSPGTLSLSPGERATLSCRASQSVSSSYLAWYQQKPGQAPRLLIYSASSRATGIPDRFSGSGSGTDFTLTISRLEPEDFAVYFCQQYVGLTGWTFGQGTKVEIKGGGGSGGSGSGGGGSASGSGQMQLVQSGPEVKKPGTSVKVSCKASGFTFTSSAVQWVRQRQRLEWIGWIVVGSGNTNYAQKFQERVTITRDMSTSTAYMELSSLRSEDTAVYYCAAPNCSNVVCYDGFDIWGQGTMVTVSSGGSSGQITLKESGPTLVKPTQTLTLTCTFSGFSLSISGVGVGWLRQPPGKALEWLALIYWDDDKRYSPSLKSRLTISKDTSKNQVVLKMTNIDPVDTATYYCAHHSISTIFDHWGQGTLVTVSSASGGSGDKTHTCPPCPAPELLGGPSVFLFPPKPKDTLMISRTPEVTCVVVDVSHEDPEVKFNWYVDGVEVHNAKTKPREEQYNSYVVSVLTVLHQDWLNGKEYKCKVSNKALPAPIEKTISKAKGQPREPQVYTLPPCRDELTKNQVSLWCLVKGFYPSDIAVEWESNGQPENNYKTTPPVLDSDGSFFKKLTVDKSRWQQGNVFSCSVLHEALHSHYTQKSLSLSPG

SEQ ID NO: 231 - protein, 718 aa, synthetic construct
  REGION 1..718: note = LY-CoV1404_A23-58H/L93VGLTG X A23-58H/L93VGLTG_LY-CoV1404_IgG1 KiH LS - MD27_ A23-58H/L93VGLTG_LY-CoV1404_IgG1 Hcc LS
EIVLTQSPGTLSLSPGERATLSCRASQSVSSSYLAWYQQKPGQAPRLLIYSASSRATGIPDRFSGSGSGTDFTLTISRLEPEDFAVYFCQQYVGLTGWTFGQGTKVEIKGGSSGQSALTQPASVSGSPGQSITISCTATSSDVGDYNYVSWYQQHPGKAPKLMIFEVSDRPSGISNRFSGSKSGNTASLTISGLQAEDEADYYCSSYTTSSAVFGGGTKLTVLGGGGSGGSGSGGGGSASGSGQITLKESGPTLVKPTQTLTLTCTFSGFSLSISGVGVGWLRQPPGKALEWLALIYWDDDKRYSPSLKSRLTISKDTSKNQVVLKMTNIDPVDTATYYCAHHSISTIFDHWGQGTLVTVSSGGSSGQMQLVQSGPEVKKPGTSVKVSCKASGFTFTSSAVQWVRQRQRLEWIGWIVVGSGNTNYAQKFQERVTITRDMSTSTAYMELSSLRSEDTAVYYCAAPNCSNVVCYDGFDIWGQGTMVTVSSASGGSGDKTHTCPPCPAPELLGGPSVFLFPPKPKDTLMISRTPEVTCVVVDVSHEDPEVKFNWYVDGVEVHNAKTKPREEQYNSYVVSVLTVLHQDWLNGKEYKCKVSNKALPAPIEKTISKAKGQPREPQVCTLPPSRDELTKNQVSLSCAVKGFYPSDIAVEWESNGQPENNYKTTPPVLDSDGSFFLVSKLTVDKSRWQQGNVFSCSVLHEALHSHYTQKSLSLSPG

SEQ ID NO: 232 - protein, 722 aa, synthetic construct; identical to SEQ ID NO: 194
  REGION 1..722: note = A19-46_A23-58H/L93VGLTG X A23-58H/L93VGLTG_LY-CoV1404_IgG1 KiH LS - MD21_ A19-46_A23-58H/L93VGLTG_IgG1 Kcc LS

SEQ ID NO: 233 - protein, 718 aa, synthetic construct; identical to SEQ ID NO: 231
  REGION 1..718: note = A19-46_A23-58H/L93VGLTG X A23-58H/L93VGLTG_LY-CoV1404_IgG1 KiH LS - MD27_ A23-58H/L93VGLTG_LY-CoV1404_IgG1 Hcc LS

SEQ ID NO: 234 - protein, 722 aa, synthetic construct; identical to SEQ ID NO: 194
  REGION 1..722: note = A19-46_A23-58H/L93VGLTG X LY-CoV1404_A23-58H/L93VGLTG_IgG1 KiH LS - MD21_ A19-46_A23-58H/L93VGLTG_IgG1 Kcc LS

SEQ ID NO: 235 - protein, 718 aa, synthetic construct
  REGION 1..718: note = A19-46_A23-58H/L93VGLTG X LY-CoV1404_A23-58H/L93VGLTG_IgG1 KiH LS - MD28_ LY-CoV1404_A23-58H/L93VGLTG_IgG1 Hcc LS
QSALTQPASVSGSPGQSITISCTATSSDVGDYNYVSWYQQHPGKAPKLMIFEVSDRPSGISNRFSGSKSGNTASLTISGLQAEDEADYYCSSYTTSSAVFGGGTKLTVLGGSSGEIVLTQSPGTLSLSPGERATLSCRASQSVSSSYLAWYQQKPGQAPRLLIYSASSRATGIPDRFSGSGSGTDFTLTISRLEPEDFAVYFCQQYVGLTGWTFGQGTKVEIKGGGGSGGSGSGGGGSASGSGQMQLVQSGPEVKKPGTSVKVSCKASGFTFTSSAVQWVRQRQRLEWIGWIVVGSGNTNYAQKFQERVTITRDMSTSTAYMELSSLRSEDTAVYYCAAPNCSNVVCYDGFDIWGQGTMVTVSSGGSSGQITLKESGPTLVKPTQTLTLTCTFSGFSLSISGVGVGWLRQPPGKALEWLALIYWDDDKRYSPSLKSRLTISKDTSKNQVVLKMTNIDPVDTATYYCAHHSISTIFDHWGQGTLVTVSSASGGSGDKTHTCPPCPAPELLGGPSVFLFPPKPKDTLMISRTPEVTCVVVDVSHEDPEVKFNWYVDGVEVHNAKTKPREEQYNSYVVSVLTVLHQDWLNGKEYKCKVSNKALPAPIEKTISKAKGQPREPQVCTLPPSRDELTKNQVSLSCAVKGFYPSDIAVEWESNGQPENNYKTTPPVLDSDGSFFLVSKLTVDKSRWQQGNVFSCSVLHEALHSHYTQKSLSLSPG

SEQ ID NO: 236 - protein, 722 aa, synthetic construct; identical to SEQ ID NO: 207
  REGION 1..722: note = A23-58H/L93VGLTG_A19-46 X A23-58H/L93VGLTG_LY-CoV1404_IgG1 KiH LS - MD14_ A23-58H/L93VGLTG_A19-46_IgG1 KCC LS

SEQ ID NO: 237 - protein, 718 aa, synthetic construct; identical to SEQ ID NO: 231
  REGION 1..718: note = A23-58H/L93VGLTG_A19-46 X A23-58H/L93VGLTG_LY-CoV1404_IgG1 KiH LS - MD27_ A23-58H/L93VGLTG_LY-CoV1404_IgG1 Hcc LS

SEQ ID NO: 238 - protein, 722 aa, synthetic construct; identical to SEQ ID NO: 207
  REGION 1..722: note = A23-58H/L93VGLTG_A19-46 X LY-CoV1404_A23-58H/L93VGLTG_IgG1 KiH LS - MD14_ A23-58H/L93VGLTG_A19-46_IgG1 KCC LS

SEQ ID NO: 239 - protein, 718 aa, synthetic construct; identical to SEQ ID NO: 235
  REGION 1..718: note = A23-58H/L93VGLTG_A19-46 X LY-CoV1404_A23-58H/L93VGLTG_IgG1 KiH LS - MD28_ LY-CoV1404_A23-58H/L93VGLTG_IgG1 Hcc LS

SEQ ID NO: 240 - protein, 716 aa, synthetic construct
  REGION 1..716: note = A23-58H/L93VGLTG_LY-CoV1404 X LY-CoV1404_A19-46_IgG1 KiH LS - MD29_ A23-58H/L93VGLTG_LY-CoV1404_IgG1 Kcc LS
EIVLTQSPGTLSLSPGERATLSCRASQSVSSSYLAWYQQKPGQAPRLLIYSASSRATGIPDRFSGSGSGTDFTLTISRLEPEDFAVYFCQQYVGLTGWTFGQGTKVEIKGGSSGQSALTQPASVSGSPGQSITISCTATSSDVGDYNYVSWYQQHPGKAPKLMIFEVSDRPSGISNRFSGSKSGNTASLTISGLQAEDEADYYCSSYTTSSAVFGGGTKLTVLGGGGSGGSGSGGGGSASGSGQITLKESGPTLVKPTQTLTLTCTFSGFSLSISGVGVGWLRQPPGKALEWLALIYWDDDKRYSPSLKSRLTISKDTSKNQVVLKMTNIDPVDTATYYCAHHSISTIFDHWGQGTLVTVSSGGSSGQMQLVQSGPEVKKPGTSVKVSCKASGFTFTSSAVQWVRQRQRLEWIGWIVVGSGNTNYAQKFQERVTITRDMSTSTAYMELSSLRSEDTAVYYCAAPNCSNVVCYDGFDIWGQGTMVTVSSASGGSGDKTHTCPPCPAPELLGGPSVFLFPPKPKDTLMISRTPEVTCVVVDVSHEDPEVKFNWYVDGVEVHNAKTKPREEQYNSYVVSVLTVLHQDWLNGKEYKCKVSNKALPAPIEKTISKAKGQPREPQVYTLPPCRDELTKNQVSLWCLVKGFYPSDIAVEWESNGQPENNYKTTPPVLDSDGSFFKKLTVDKSRWQQGNVFSCSVLHEALHSHYTQKSLSLSPG

SEQ ID NO: 241 - protein, 722 aa, synthetic construct
  REGION 1..722: note = A23-58H/L93VGLTG_LY-CoV1404 X LY-CoV1404_A19-46_IgG1 KiH LS - MD30_ LY-CoV1404_A19-46_IgG1 Hcc LS
QSALTQPASVSGSPGQSITISCTATSSDVGDYNYVSWYQQHPGKAPKLMIFEVSDRPSGISNRFSGSKSGNTASLTISGLQAEDEADYYCSSYTTSSAVFGGGTKLTVLGGSSGQTVVTQEPSFSVSPGGTVTLTCGLSSGSVSTAYFPSWYQQTPGQAPRTLIYGTNTRSSGVPDRFSGSILGNKAALTITGAQADDESDYYCVLYMGRGIVVFGGGTKLTVLGGGGSGGSGSGGGGSASGSGQVQLVESGGGVVQPGRSLRLSCAASGFTLSSYGMHWVRQAPGKGLEWVAVISYDGSNKYYVDSVKGRFTISRDNSKNTLYLQMNSLRAEDTAVYYCRWAYWELLPDYYYGMDVWGQGTTVTVSSGGSSGQITLKESGPTLVKPTQTLTLTCTFSGFSLSISGVGVGWLRQPPGKALEWLALIYWDDDKRYSPSLKSRLTISKDTSKNQVVLKMTNIDPVDTATYYCAHHSISTIFDHWGQGTLVTVSSASGGSGDKTHTCPPCPAPELLGGPSVFLFPPKPKDTLMISRTPEVTCVVVDVSHEDPEVKFNWYVDGVEVHNAKTKPREEQYNSYVVSVLTVLHQDWLNGKEYKCKVSNKALPAPIEKTISKAKGQPREPQVCTLPPSRDELTKNQVSLSCAVKGFYPSDIAVEWESNGQPENNYKTTPPVLDSDGSFFLVSKLTVDKSRWQQGNVFSCSVLHEALHSHYTQKSLSLSPG

SEQ ID NO: 242 - protein, 716 aa, synthetic construct; identical to SEQ ID NO: 230
  REGION 1..716: note = LY-CoV1404_A23-58H/L93VGLTG X LY-CoV1404_A19-46_IgG1 KiH LS - MD26_ LY-CoV1404_A23-58H/L93VGLTG_IgG1 Kcc LS

SEQ ID NO: 243 - protein, 722 aa, synthetic construct; identical to SEQ ID NO: 241
  REGION 1..722: note = LY-CoV1404_A23-58H/L93VGLTG X LY-CoV1404_A19-46_IgG1 KiH LS - MD30_ LY-CoV1404_A19-46_IgG1 Hcc LS

SEQ ID NO: 244 - protein, 719 aa, synthetic construct
  REGION 1..719: note = A19-46_LY-CoV1404 X A23-58H/L93VGLTG_LY-CoV1404_IgG1 KiH LS - MD31_ A19-46_LY-CoV1404_IgG1 Kcc LS
QTVVTQEPSFSVSPGGTVTLTCGLSSGSVSTAYFPSWYQQTPGQAPRTLIYGTNTRSSGVPDRFSGSILGNKAALTITGAQADDESDYYCVLYMGRGIVVFGGGTKLTVLGGSSGQSALTQPASVSGSPGQSITISCTATSSDVGDYNYVSWYQQHPGKAPKLMIFEVSDRPSGISNRFSGSKSGNTASLTISGLQAEDEADYYCSSYTTSSAVFGGGTKLTVLGGGGSGGSGSGGGGSASGSGQITLKESGPTLVKPTQTLTLTCTFSGFSLSISGVGVGWLRQPPGKALEWLALIYWDDDKRYSPSLKSRLTISKDTSKNQVVLKMTNIDPVDTATYYCAHHSISTIFDHWGQGTLVTVSSGGSSGQVQLVESGGGVVQPGRSLRLSCAASGFTLSSYGMHWVRQAPGKGLEWVAVISYDGSNKYYVDSVKGRFTISRDNSKNTLYLQMNSLRAEDTAVYYCRWAYWELLPDYYYGMDVWGQGTTVTVSASGGSGDKTHTCPPCPAPELLGGPSVFLFPPKPKDTLMISRTPEVTCVVVDVSHEDPEVKFNWYVDGVEVHNAKTKPREEQYNSYVVSVLTVLHQDWLNGKEYKCKVSNKALPAPIEKTISKAKGQPREPQVYTLPPCRDELTKNQVSLWCLVKGFYPSDIAVEWESNGQPENNYKTTPPVLDSDGSFFKKLTVDKSRWQQGNVFSCSVLHEALHSHYTQKSLSLSPG

SEQ ID NO: 245 - protein, 718 aa, synthetic construct; identical to SEQ ID NO: 231
  REGION 1..718: note = A19-46_LY-CoV1404 X A23-58H/L93VGLTG_LY-CoV1404_IgG1 KiH LS - MD27_ A23-58H/L93VGLTG_LY-CoV1404_IgG1 Hcc LS

SEQ ID NO: 246 - protein, 719 aa, synthetic construct; identical to SEQ ID NO: 244
  REGION 1..719: note = A19-46_LY-CoV1404 X LY-CoV1404_A23-58H/L93VGLTG_IgG1 KiH LS - MD31_ A19-46_LY-CoV1404_IgG1 Kcc LS

SEQ ID NO: 247 - protein, 718 aa, synthetic construct; identical to SEQ ID NO: 235
  REGION 1..718: note = A19-46_LY-CoV1404 X LY-CoV1404_A23-58H/L93VGLTG_IgG1 KiH LS - MD28_ LY-CoV1404_A23-58H/L93VGLTG_IgG1 Hcc LS

SEQ ID NO: 248 - protein, 722 aa, synthetic construct; identical to SEQ ID NO: 194
  REGION 1..722: note = A19-46_A23-58H/L93VGLTG X A19-46_LY-CoV1404_IgG1 KiH LS - MD21_ A19-46_A23-58H/L93VGLTG_IgG1 Kcc LS

SEQ ID NO: 249 - protein, 721 aa, synthetic construct
  REGION 1..721: note = A19-46_A23-58H/L93VGLTG X A19-46_LY-CoV1404_IgG1 KiH LS - MD32_ A19-46_LY-CoV1404_IgG1 Hcc LS
QTVVTQEPSFSVSPGGTVTLTCGLSSGSVSTAYFPSWYQQTPGQAPRTLIYGTNTRSSGVPDRFSGSILGNKAALTITGAQADDESDYYCVLYMGRGIVVFGGGTKLTVLGGSSGQSALTQPASVSGSPGQSITISCTATSSDVGDYNYVSWYQQHPGKAPKLMIFEVSDRPSGISNRFSGSKSGNTASLTISGLQAEDEADYYCSSYTTSSAVFGGGTKLTVLGGGGSGGSGSGGGGSASGSGQITLKESGPTLVKPTQTLTLTCTFSGFSLSISGVGVGWLRQPPGKALEWLALIYWDDDKRYSPSLKSRLTISKDTSKNQVVLKMTNIDPVDTATYYCAHHSISTIFDHWGQGTLVTVSSGGSSGQVQLVESGGGVVQPGRSLRLSCAASGFTLSSYGMHWVRQAPGKGLEWVAVISYDGSNKYYVDSVKGRFTISRDNSKNTLYLQMNSLRAEDTAVYYCRWAYWELLPDYYYGMDVWGQGTTVTVSASGGSGDKTHTCPPCPAPELLGGPSVFLFPPKPKDTLMISRTPEVTCVVVDVSHEDPEVKFNWYVDGVEVHNAKTKPREEQYNSYVVSVLTVLHQDWLNGKEYKCKVSNKALPAPIEKTISKAKGQPREPQVCTLPPSRDELTKNQVSLSCAVKGFYPSDIAVEWESNGQPENNYKTTPPVLDSDGSFFLVSKLTVDKSRWQQGNVFSCSVLHEALHSHYTQKSLSLSPG

SEQ ID NO: 250 - protein, 722 aa, synthetic construct; identical to SEQ ID NO: 194
  REGION 1..722: note = A19-46_A23-58H/L93VGLTG X LY-CoV1404_A19-46_IgG1 KiH LS - MD21_ A19-46_A23-58H/L93VGLTG_IgG1 Kcc LS

SEQ ID NO: 251 - protein, 722 aa, synthetic construct; identical to SEQ ID NO: 241
  REGION 1..722: note = A19-46_A23-58H/L93VGLTG X LY-CoV1404_A19-46_IgG1 KiH LS - MD30_ LY-CoV1404_A19-46_IgG1 Hcc LS

SEQ ID NO: 252 - protein, 722 aa, synthetic construct; identical to SEQ ID NO: 207
  REGION 1..722: note = A23-58H/L93VGLTG_A19-46 X A19-46_LY-CoV1404_IgG1 KiH LS - MD14_ A23-58H/L93VGLTG_A19-46_IgG1 KCC LS

SEQ ID NO: 253 - protein, 721 aa, synthetic construct; identical to SEQ ID NO: 249
  REGION 1..721: note = A23-58H/L93VGLTG_A19-46 X A19-46_LY-CoV1404_IgG1 KiH LS - MD32_ A19-46_LY-CoV1404_IgG1 Hcc LS

SEQ ID NO: 254 - protein, 722 aa, synthetic construct; identical to SEQ ID NO: 207
  REGION 1..722: note = A23-58H/L93VGLTG_A19-46 X LY-CoV1404_A19-46_IgG1 KiH LS - MD14_ A23-58H/L93VGLTG_A19-46_IgG1 KCC LS

SEQ ID NO: 255 - protein, 722 aa, synthetic construct; identical to SEQ ID NO: 241
  REGION 1..722: note = A23-58H/L93VGLTG_A19-46 X LY-CoV1404_A19-46_IgG1 KiH LS - MD30_ LY-CoV1404_A19-46_IgG1 Hcc LS

SEQ ID NO: 256 - protein, 722 aa, synthetic construct
  REGION 1..722: note = MX1042; E12 (class 1); E8 (class 3)
DTVMTQSPLSLPVTPGEPASISCRSSQSLLNSNGYNYLDWYVQKPGQSPQLLIYLGSNRASGVPDRFSGSGSGTDFTLKISRVEAEDVGVYYCMQPLQTPLFTFGPGTKVEIKGGSSGEIVLTQSPGTLSLSPGETATLSCRASQSFSSDLAWYQQKPGQAPRLLIYGASSRATGIPDRFSGSGSGTDFTLTISRLEPADFAVYYCQQYGSSPPVTFGGGTKVEIKGGGGSGGSGSGGGGSASGSGEVQLVESGGGLIQPGGSLRLSCAASGVIVSYNYMNWVRQAPGKGLEWVSVIYSGGSTFYADSVRGRFTISRDNSKNTLYLQMNSLRAEDTAVYYCARDLGPAGAFDIWGLGTMVTVSSGGSSGQVTLRESGPALVKPTQTLTLTCTFSGFSLSTRGVCVSWIRQPPGKALEWLAFIDWDDDKYYNTSLKTRLTISKDTSKNQVVLTMTNVHPVDTATYYCARISSHHGSSWCTTFDYWGQGALVTVSAASGGSGDKTHTCPPCPAPELLGGPSVFLFPPKPKDTLMISRTPEVTCVVVDVSHEDPEVKFNWYVDGVEVHNAKTKPREEQYNSYVVSVLTVLHQDWLNGKEYKCKVSNKALPAPIEKTISKAKGQPREPQVYTLPPSRDELTKNQVSLTCLVKGFYPSDIAVEWESNGQPENNYKTTPPVLDSDGSFFKKLTVDKSRWQQGNVFSCSVLHEALHSHYTQKSLSLSPG

SEQ ID NO: 257 - protein, 718 aa, synthetic construct
  REGION 1..718: note = MX1069; E12 (class 1); A46 (class 2); E8 (class 3); peptide 1
QTVVTQEPSFSVSPGGTVTLTCGLSSGSVSTAYFPSWYQQTPGQAPRTLIYGTNTRSSGVPDRFSGSILGNKAALTITGAQADDESDYYCVLYMGRGIVVFGGGTKLTVLGGSSGEIVLTQSPGTLSLSPGETATLSCRASQSFSSDLAWYQQKPGQAPRLLIYGASSRATGIPDRFSGSGSGTDFTLTISRLEPADFAVYYCQQYGSSPPVTFGGGTKVEIKGGGGSGGSGSGGGGSASGSGEVQLVESGGGLIQPGGSLRLSCAASGVIVSYNYMNWVRQAPGKGLEWVSVIYSGGSTFYADSVRGRFTISRDNSKNTLYLQMNSLRAEDTAVYYCARDLGPAGAFDIWGLGTMVTVSSGGSSGQVQLVESGGGVVQPGRSLRLSCAASGFTLSSYGMHWVRQAPGKGLEWVAVISYDGSNKYYVDSVKGRFTISRDNSKNTLYLQMNSLRAEDTAVYYCRWAYWELLPDYYYGMDVWGQGTTVTVSSASGGSGDKTHTCPPCPAPELLGGPSVFLFPPKPKDTLMISRTPEVTCVVVDVSHEDPEVKFNWYVDGVEVHNAKTKPREEQYNSYVVSVLTVLHQDWLNGKEYKCKVSNKALPAPIEKTISKAKGQPREPQVYTLPPCRDELTKNQVSLWCLVKGFYPSDIAVEWESNGQPENNYKTTPPVLDSDGSFFKKLTVDKSRWQQGNVFSCSVLHEALHSHYTQKSLSLSPG

SEQ ID NO: 258 - protein, 724 aa, synthetic construct
  REGION 1..724: note = MX1069; E12 (class 1); A46 (class 2); E8 (class 3); peptide 2
EIVLTQSPGTLSLSPGETATLSCRASQSFSSDLAWYQQKPGQAPRLLIYGASSRATGIPDRFSGSGSGTDFTLTISRLEPADFAVYYCQQYGSSPPVTFGGGTKVEIKGGSSGDTVMTQSPLSLPVTPGEPASISCRSSQSLLNSNGYNYLDWYVQKPGQSPQLLIYLGSNRASGVPDRFSGSGSGTDFTLKISRVEAEDVGVYYCMQPLQTPLFTFGPGTKVEIKGGGGSGGSGSGGGGSASGSGQVTLRESGPALVKPTQTLTLTCTFSGFSLSTRGVCVSWIRQPPGKALEWLAFIDWDDDKYYNTSLKTRLTISKDTSKNQVVLTMTNVHPVDTATYYCARISSHHGSSWCTTFDYWGQGALVTVSAGGSSGEVQLVESGGGLIQPGGSLRLSCAASGVIVSYNYMNWVRQAPGKGLEWVSVIYSGGSTFYADSVRGRFTISRDNSKNTLYLQMNSLRAEDTAVYYCARDLGPAGAFDIWGLGTMVTVSSASGGSGDKTHTCPPCPAPELLGGPSVFLFPPKPKDTLMISRTPEVTCVVVDVSHEDPEVKFNWYVDGVEVHNAKTKPREEQYNSYVVSVLTVLHQDWLNGKEYKCKVSNKALPAPIEKTISKAKGQPREPQVCTLPPSRDELTKNQVSLSCAVKGFYPSDIAVEWESNGQPENNYKTTPPVLDSDGSFFLVSKLTVDKSRWQQGNVFSCSVLHEALHSHYTQKSLSLSPG

SEQ ID NO: 259 - protein, 109 aa, synthetic construct
  REGION 1..109: note = VL B8
EIVMTQSPAILSVSPGERATLSCRASQSVAINLAWYQQKPGQAPRLLIYAASSRATGIPGRFSGSGSETNFTLTISSLQSGDFAVYYCQQYITWPPSYTFGQGTKLEIK

SEQ ID NO: 260 - protein, 11 aa, synthetic construct
  REGION 1..11: note = LCDR1 B8
RASQSVAINLA

SEQ ID NO: 261 - protein, 7 aa, synthetic construct
  REGION 1..7: note = LCDR2 B8
AASSRAT

SEQ ID NO: 262 - protein, 11 aa, synthetic construct
  REGION 1..11: note = LCDR3 B8
QQYITWPPSYT

SEQ ID NO: 263 - protein, 117 aa, synthetic construct
  REGION 1..117: note = VH B8
EVQLVESGGALIQPGGSLRLSCAASGIIVSANYMSWVRQAPGKGLEWVSVIYSGGSTFYADSVKGRFTISRDNSKNTLYLEMNSLRAEDTAVYYCARDAPILGVSDWGQGTLVTVSS

SEQ ID NO: 264 - protein, 8 aa, synthetic construct
  REGION 1..8: note = HCDR1 B8
GIIVSANY

SEQ ID NO: 265 - protein, 7 aa, synthetic construct
  REGION 1..7: note = HCDR2 B8
IYSGGST

SEQ ID NO: 266 - protein, 11 aa, synthetic construct
  REGION 1..11: note = HCDR3 B8
ARDAPILGVSD

SEQ ID NO: 267 - protein, 108 aa, synthetic construct
  REGION 1..108: note = VL E12
EIVLTQSPGTLSLSPGETATLSCRASQSFSSDLAWYQQKPGQAPRLLIYGASSRATGIPDRFSGSGSGTDFTLTISRLEPADFAVYYCQQYGSSPPVTFGGGTKVEIK

SEQ ID NO: 268 - protein, 6 aa, synthetic construct
  REGION 1..6: note = LCDR1 E12
QSFSSD

SEQ ID NO: 269 - skipped

SEQ ID NO: 270 - protein, 10 aa, synthetic construct
  REGION 1..10: note = LCDR3 E12
QQYGSSPPVT

SEQ ID NO: 271 - protein, 118 aa, synthetic construct
  REGION 1..118: note = VH E12
EVQLVESGGGLIQPGGSLRLSCAASGVIVSYNYMNWVRQAPGKGLEWVSVIYSGGSTFYADSVRGRFTISRDNSKNTLYLQMNSLRAEDTAVYYCARDLGPAGAFDIWGLGTMVTVSS

SEQ ID NO: 272 - protein, 8 aa, synthetic construct
  REGION 1..8: note = HCDR1 E12
GVIVSYNY

SEQ ID NO: 273 - protein, 7 aa, synthetic construct
  REGION 1..7: note = HCDR2 E12
IYSGGST

SEQ ID NO: 274 - protein, 12 aa, synthetic construct
  REGION 1..12: note = HCDR3 E12
ARDLGPAGAFDI

SEQ ID NO: 275 - protein, 113 aa, synthetic construct
  REGION 1..113: note = VL E8
DTVMTQSPLSLPVTPGEPASISCRSSQSLLNSNGYNYLDWYVQKPGQSPQLLIYLGSNRASGVPDRFSGSGSGTDFTLKISRVEAEDVGVYYCMQPLQTPLFTFGPGTKVEIK

SEQ ID NO: 276 - protein, 11 aa, synthetic construct
  REGION 1..11: note = LCDR1 E8
QSLLNSNGYNY

SEQ ID NO: 277 - skipped

SEQ ID NO: 278 - protein, 10 aa, synthetic construct
  REGION 1..10: note = LCDR3 E8
MQPLQTPLFT

SEQ ID NO: 279 - protein, 125 aa, synthetic construct
  REGION 1..125: note = VH E8
QVTLRESGPALVKPTQTLTLTCTFSGFSLSTRGVCVSWIRQPPGKALEWLAFIDWDDDKYYNTSLKTRLTISKDTSKNQVVLTMTNVHPVDTATYYCARISSHHGSSWCTTFDYWGQGALVTVSA

SEQ ID NO: 280 - protein, 10 aa, synthetic construct
  REGION 1..10: note = HCDR1 E8
GFSLSTRGVC

SEQ ID NO: 281 - protein, 7 aa, synthetic construct
  REGION 1..7: note = HCDR2 E8
IDWDDDK

SEQ ID NO: 282 - protein, 17 aa, synthetic construct
  REGION 1..17: note = HCDR3 E8
ARISSHHGSSWCTTFDY

SEQ ID NO: 283 - protein, 109 aa, synthetic construct; identical to SEQ ID NO: 174
  REGION 1..109: note = VL A23-58H/L93VGLTG

SEQ ID NO: 284 - protein, 7 aa, synthetic construct
  REGION 1..7: note = LCDR1 A23-58H/L93VGLTG
QSVSSSY

SEQ ID NO: 285 - protein, 4 aa, synthetic construct
  REGION 1..4: note = LCDR2 A23-58H/L93VGLTG
SASS

SEQ ID NO: 286 - protein, 10 aa, synthetic construct
  REGION 1..10: note = LCDR3 A23-58H/L93VGLTG
QQYVGLTGWT

SEQ ID NO: 287 - protein, 121 aa, synthetic construct; identical to SEQ ID NO: 74
  REGION 1..121: note = VH A23-58H/L93VGLTG

SEQ ID NO: 288 - protein, 8 aa, synthetic construct
  REGION 1..8: note = HCDR1 A23-58H/L93VGLTG
GFTFTSSA

SEQ ID NO: 289 - protein, 8 aa, synthetic construct
  REGION 1..8: note = HCDR2 A23-58H/L93VGLTG
IVVGSGNT

SEQ ID NO: 290 - protein, 16 aa, synthetic construct
  REGION 1..16: note = HCDR3 A23-58H/L93VGLTG
AAPNCSNVVCYDGFDI

SEQ ID NO: 291 - protein, 710 aa, synthetic construct
  REGION 1..710: note = MX1018
EIVMTQSPAILSVSPGERATLSCRASQSVAINLAWYQQKPGQAPRLLIYAASSRATGIPGRFSGSGSETNFTLTISSLQSGDFAVYYCQQYITWPPSYTFGQGTKLEIKGGSSGEIVMTQSPAILSVSPGERATLSCRASQSVAINLAWYQQKPGQAPRLLIYAASSRATGIPGRFSGSGSETNFTLTISSLQSGDFAVYYCQQYITWPPSYTFGQGTKLEIKGGGGSGGSGSGGGGSASGSGEVQLVESGGALIQPGGSLRLSCAASGIIVSANYMSWVRQAPGKGLEWVSVIYSGGSTFYADSVKGRFTISRDNSKNTLYLEMNSLRAEDTAVYYCARDAPILGVSDWGQGTLVTVSSGGSSGEVQLVESGGALIQPGGSLRLSCAASGIIVSANYMSWVRQAPGKGLEWVSVIYSGGSTFYADSVKGRFTISRDNSKNTLYLEMNSLRAEDTAVYYCARDAPILGVSDWGQGTLVTVSSASGGSGDKTHTCPPCPAPELLGGPSVFLFPPKPKDTLMISRTPEVTCVVVDVSHEDPEVKFNWYVDGVEVHNAKTKPREEQYNSYVVSVLTVLHQDWLNGKEYKCKVSNKALPAPIEKTISKAKGQPREPQVYTLPPSRDELTKNQVSLTCLVKGFYPSDIAVEWESNGQPENNYKTTPPVLDSDGSFFKKLTVDKSRWQQGNVFSCSVLHEALHSHYTQKSLSLSPG

SEQ ID NO: 292 - DNA, 2142 bp, synthetic construct
  misc_feature 1..2142: note = MX1018
  source 1..2142: mol_type = other DNA
gagatcgtgatgacacagagccccgccatcctgagtgtgtctccaggcgaaagagccacactgagctgtagagcctctcagagcgtggccatcaacctggcctggtatcagcagaagcctggacaggctccccggctgctgatctatgccgcttcttctagagccacaggcatccctggcagattttctggcagcggcagcgagacaaacttcaccctgaccatcagctccctgcagagcggcgatttcgccgtgtactactgccagcagtacatcacctggccacctagctacacctttggccagggcaccaagctggaaatcaaaggcggatcctctggagaaattgtgatgacccagtctcctgccatcctgtccgtttctccaggggagagagctaccctgtcttgcagagcttctcagtctgtggctatcaatctcgcttggtatcaacaaaagcccgggcaagcccctagactgctgatatacgctgccagctccagagccaccggaattcccggaagattcagcggctctggctccgagactaatttcacactgacaatctccagcctgcagtccggggactttgccgtgtattattgtcaacagtatattacgtggccgccgtcctacacattcggacagggaacaaagctcgagatcaaaggaggtggtggctctggcggatctgggagtggtggcggaggctctgcttctggatctggagaagtgcagctggtggaaagtggcggagcactgattcagcctggcggctctctgagactgtcttgtgccgcctctggcatcatcgtgtccgccaactacatgagctgggtccgacaggcccctggcaaaggacttgaatgggtgtccgtgatctacagcggcggcagcaccttttacgccgactctgtgaagggcagattcaccatcagccgggacaacagcaagaacaccctgtacctggaaatgaacagcctgagagccgaggacaccgctgtgtactattgcgccagagatgcccctatcctgggcgtgtcagattggggccagggaacactggtcacagtgtctagcggaggcagctccggggaggtccagctcgttgaatctggtggcgccctgattcaaccaggtggaagcctgagactgagctgcgccgcttccggaatcattgtgtctgccaattatatgtcttgggttcgacaagctcccggcaagggcctcgagtgggtttcagtgatctattccggcggctccacattctacgccgacagcgtgaaaggccggtttaccatcagcagagacaattccaagaatacgctctacctcgagatgaactcactgcgcgccgaggatacagcagtgtattactgtgctcgggacgctcccattctgggagtgtctgactggggacaaggcaccctcgtgacagtgtcatctgcttctggcggctccggagataagacccacacatgtcctccatgtcctgctccagaactgctcggcggcccttctgtgttcctgtttcctccaaagcctaaggacaccctgatgatcagcagaacccctgaagtgacctgcgtggtggtggatgtgtctcacgaggaccccgaagtgaagttcaattggtacgtggacggcgtggaagtgcacaacgccaagaccaagcctagagaggaacagtacaacagcacctacagagtggtgtccgtgctgaccgtgctgcaccaggattggctgaacggcaaagagtacaagtgcaaggtgtccaacaaggccctgcctgctcctatcgagaaaaccatcagcaaggccaagggccagcctagggaaccccaggtttacacccttcctccaagccgggatgagctgaccaagaaccaggtgtccctgacatgtctcgtgaagggcttctaccccagcgacattgccgtggaatgggagagcaatggccagcctgagaacaactacaagacaacccctcctgtgctggacagcgacggctcattcttcctgtacagcaagctgacagtcgacaagtccagatggcagcagggcaacgtgttcagttgcagcgtgctgcacgaggccctgcacagtcactacacccagaagtccctgagcctgtctcctgga

SEQ ID NO: 293 - protein, 222 aa, synthetic construct
  REGION 1..222: note = Fc
DKTHTCPPCPAPELLGGPSVFLFPPKPKDTLMISRTPEVTCVVVDVSHEDPEVKFNWYVDGVEVHNAKTKPREEQYNSYVVSVLTVLHQDWLNGKEYKCKVSNKALPAPIEKTISKAKGQPREPQVYTLPPCRDELTKNQVSLWCLVKGFYPSDIAVEWESNGQPENNYKTTPPVLDSDGSFFKKLTVDKSRWQQGNVFSCSVLHEALHSHYTQKSLSLSPG

SEQ ID NO: 294 - protein, 224 aa, synthetic construct
  REGION 1..224: note = Fc
DKTHTCPPCPAPELLGGPSVFLFPPKPKDTLMISRTPEVTCVVVDVSHEDPEVKFNWYVDGVEVHNAKTKPREEQYNSYVVSVLTVLHQDWLNGKEYKCKVSNKALPAPIEKTISKAKGQPREPQVCTLPPSRDELTKNQVSLSCAVKGFYPSDIAVEWESNGQPENNYKTTPPVLDSDGSFFLVSKLTVDKSRWQQGNVFSCSVLHEALHSHYTQKSLSLSPG

SEQ ID NO: 295 - protein, 710 aa, synthetic construct
  REGION 1..710: note = MX1029
EIVLTQSPGTLSLSPGETATLSCRASQSFSSDLAWYQQKPGQAPRLLIYGASSRATGIPDRFSGSGSGTDFTLTISRLEPADFAVYYCQQYGSSPPVTFGGGTKVEIKGGSSGEIVLTQSPGTLSLSPGETATLSCRASQSFSSDLAWYQQKPGQAPRLLIYGASSRATGIPDRFSGSGSGTDFTLTISRLEPADFAVYYCQQYGSSPPVTFGGGTKVEIKGGGGSGGSGSGGGGSASGSGEVQLVESGGGLIQPGGSLRLSCAASGVIVSYNYMNWVRQAPGKGLEWVSVIYSGGSTFYADSVRGRFTISRDNSKNTLYLQMNSLRAEDTAVYYCARDLGPAGAFDIWGLGTMVTVSSGGSSGEVQLVESGGGLIQPGGSLRLSCAASGVIVSYNYMNWVRQAPGKGLEWVSVIYSGGSTFYADSVRGRFTISRDNSKNTLYLQMNSLRAEDTAVYYCARDLGPAGAFDIWGLGTMVTVSSASGGSGDKTHTCPPCPAPELLGGPSVFLFPPKPKDTLMISRTPEVTCVVVDVSHEDPEVKFNWYVDGVEVHNAKTKPREEQYNSYVVSVLTVLHQDWLNGKEYKCKVSNKALPAPIEKTISKAKGQPREPQVYTLPPSRDELTKNQVSLTCLVKGFYPSDIAVEWESNGQPENNYKTTPPVLDSDGSFFKKLTVDKSRWQQGNVFSCSVLHEALHSHYTQKSLSLSPG

SEQ ID NO: 296 - DNA, 2142 bp, synthetic construct
  misc_feature 1..2142: note = MX1029
  source 1..2142: mol_type = other DNA
gagatcgtgctgacacagagccctggcacactgtcactgtctccaggcgaaacagccacactgagctgtagagccagccagagcttcagcagcgacctggcttggtatcagcagaagcctggacaggcccctcggctgttgatctatggcgcctcttctagagccacaggcatccccgatagattcagcggctctggcagcggcaccgatttcaccctgacaatcagcagactggaacccgccgacttcgccgtgtactactgtcagcagtacggcagcagccctcctgtgacatttggcggcggaacaaaggtggaaatcaaaggcggatcctctggagaaattgtgctgacccaatctccaggcactctgtctctgagcccaggcgagactgctaccctgtcttgtagagcctctcagtccttctcctccgatcttgcctggtatcaacaaaagcccgggcaagccccaagactgctgatctacggtgccagcagcagagccaccggaattcccgacaggtttagcggaagcggctccggcacagacttcacactgaccatctctcggctggaacctgctgattttgccgtctattattgccagcagtatggctctagcccaccagtgactttcggcggaggcaccaaggtcgagatcaaaggaggtggtggctctggcggatctgggagtggtggcggaggctctgcttctggatctggagaagtgcagctggtggaatcaggcggcggactgattcaacctggcggctctctgagactgtcttgtgctgcttctggcgtgatcgtgtcctacaactacatgaactgggtccgacaggctcccggcaaaggccttgaatgggtgtccgtgatctacagcggcggcagcaccttttacgccgattctgtgcggggcagattcaccatcagccgggacaacagcaagaacaccctgtacctgcagatgaacagcctgagagccgaggacaccgctgtgtactattgcgccagagatctgggacctgccggcgcttttgatatctggggcctgggcacaatggtcaccgtgtctagcggaggcagctccggggaggttcagctggttgaaagcggaggcggacttatccagccaggcggaagcctgagacttagctgtgctgcaagcggagtgatcgtcagctacaattatatgaattgggttcgccaagcacctggcaagggcctcgagtgggtttcagtcatctattccggcggctccacattctacgccgacagcgttagaggccggttcaccatctccagagacaactccaagaatacgctctatctccagatgaactctctgcgcgccgaggatacagcagtgtattactgtgctcgcgacctgggaccagctggcgcattcgacatttggggactgggaactatggttacagtgtccagcgcttctggcggctccggagataagacccacacatgtcctccatgtcctgctccagaactgctcggcggcccttctgtgttcctgtttcctccaaagcctaaggacaccctgatgatcagcagaacccctgaagtgacctgcgtggtggtggatgtgtctcacgaggaccccgaagtgaagttcaattggtacgtggacggcgtggaagtgcacaacgccaagaccaagcctagagaggaacagtacaacagcacctacagagtggtgtccgtgctgaccgtgctgcaccaggattggctgaacggcaaagagtacaagtgcaaggtgtccaacaaggccctgcctgctcctatcgagaaaaccatcagcaaggccaagggccagcctagggaaccccaggtttacacccttcctccaagccgggatgagctgaccaagaaccaggtgtccctgacatgtctcgtgaagggcttctaccccagcgacattgccgtggaatgggagagcaatggccagcctgagaacaactacaagacaacccctcctgtgctggacagcgacggctcattcttcctgtacagcaagctgacagtcgacaagtccagatggcagcagggcaacgtgttcagttgcagcgtgctgcacgaggccctgcacagtcactacacccagaagtccctgagcctgtctcctgga

SEQ ID NO: 297 - protein, 734 aa, synthetic construct
  REGION 1..734: note = MX1020
DTVMTQSPLSLPVTPGEPASISCRSSQSLLNSNGYNYLDWYVQKPGQSPQLLIYLGSNRASGVPDRFSGSGSGTDFTLKISRVEAEDVGVYYCMQPLQTPLFTFGPGTKVEIKGGSSGDTVMTQSPLSLPVTPGEPASISCRSSQSLLNSNGYNYLDWYVQKPGQSPQLLIYLGSNRASGVPDRFSGSGSGTDFTLKISRVEAEDVGVYYCMQPLQTPLFTFGPGTKVEIKGGGGSGGSGSGGGGSASGSGQVTLRESGPALVKPTQTLTLTCTFSGFSLSTRGVCVSWIRQPPGKALEWLAFIDWDDDKYYNTSLKTRLTISKDTSKNQVVLTMTNVHPVDTATYYCARISSHHGSSWCTTFDYWGQGALVTVSAGGSSGQVTLRESGPALVKPTQTLTLTCTFSGFSLSTRGVCVSWIRQPPGKALEWLAFIDWDDDKYYNTSLKTRLTISKDTSKNQVVLTMTNVHPVDTATYYCARISSHHGSSWCTTFDYWGQGALVTVSAASGGSGDKTHTCPPCPAPELLGGPSVFLFPPKPKDTLMISRTPEVTCVVVDVSHEDPEVKFNWYVDGVEVHNAKTKPREEQYNSYVVSVLTVLHQDWLNGKEYKCKVSNKALPAPIEKTISKAKGQPREPQVYTLPPSRDELTKNQVSLTCLVKGFYPSDIAVEWESNGQPENNYKTTPPVLDSDGSFFKKLTVDKSRWQQGNVFSCSVLHEALHSHYTQKSLSLSPG

SEQ ID NO: 298 - DNA, 2214 bp, synthetic construct
  misc_feature 1..2214: note = MX1020
  source 1..2214: mol_type = other DNA
gacaccgtgatgacacagagccctctgagcctgcctgtgacacctggcgaacctgccagcatcagctgtagaagcagccagagcctgctgaacagcaacggctacaactacctggattggtacgtgcagaagcccggccagtctcctcagctgctgatctacctgggcagcaatagagccagcggcgtgcccgatagattttctggctctggcagcggcaccgacttcaccctgaagatctctagagtggaagccgaggacgtgggcgtgtactactgtatgcagcctctgcagacccctctgttcacatttggccctggcaccaaggtggaaatcaaaggcggatcctctggagatacagtgatgacccaatctcctctgtctctgcccgtgactccaggcgagccagcctccatctcttgtagaagctcccagtctctgctgaactccaatgggtacaattatctcgattggtatgtccagaaaccggggcagagcccacagctcctcatctatctgggctccaacagagcctctggcgtgccagacagattcagcggatctggctccggcacagatttcacactgaaaatcagcagagtcgaggccgaagatgtgggagtgtattattgcatgcaacccctccagacaccgctgttcactttcggacccggaacaaaggtcgagatcaaaggaggtggtggctctggcggatctgggagtggtggcggaggctctgcttctggatctggacaagtgacactgagagagtctggccccgctctggtcaagcctacacagaccctgacactgacctgcaccttcagcggcttcagcctgtctactagaggcgtgtgcgtgtcctggatcagacagcctcctggaaaggccctggaatggctggccttcatcgactgggacgacgacaagtactacaacaccagcctgaaaacccggctgaccatcagcaaggacaccagcaagaaccaggtggtgctgaccatgaccaacgtgcaccctgtggataccgccacctactactgcgccagaatcagctctcaccacggctccagctggtgtaccaccttcgattattggggccagggcgctctcgtgacagtttctgctggaggcagctccgggcaagtcaccctgagagaaagcggacctgcactcgtgaagcccactcagacactcaccctgacctgtacattctccggcttctccctgtccacacggggagtgtgtgtgtcttggattcgtcagccaccaggcaaggctcttgagtggctggcttttattgattgggatgatgataagtactataatacgagcctcaagacgcgcctgaccatctccaaggatacctctaaaaatcaggtcgtcctcacgatgacaaatgtgcatcccgtggacacagccacatattactgtgcccggatctccagccaccacggatcctcttggtgcacaacctttgactactggggccaaggggcccttgtgactgtgtctgctgcttctggcggctccggagataagacccacacatgtcctccatgtcctgctccagaactgctcggcggcccttctgtgttcctgtttcctccaaagcctaaggacaccctgatgatcagcagaacccctgaagtgacctgcgtggtggtggatgtgtctcacgaggaccccgaagtgaagttcaattggtacgtggacggcgtggaagtgcacaacgccaagaccaagcctagagaggaacagtacaacagcacctacagagtggtgtccgtgctgaccgtgctgcaccaggattggctgaacggcaaagagtacaagtgcaaggtgtccaacaaggccctgcctgctcctatcgagaaaaccatcagcaaggccaagggccagcctagggaaccccaggtttacacccttcctccaagccgggatgagctgaccaagaaccaggtgtccctgacatgtctcgtgaagggcttctaccccagcgacattgccgtggaatgggagagcaatggccagcctgagaacaactacaagacaacccctcctgtgctggacagcgacggctcattcttcctgtacagcaagctgacagtcgacaagtccagatggcagcagggcaacgtgttcagttgcagcgtgctgcacgaggccctgcacagtcactacacccagaagtccctgagcctgtctcctgga

SEQ ID NO: 299 - protein, 718 aa, synthetic construct
  REGION 1..718: note = MX1021
QTVVTQEPSFSVSPGGTVTLTCGLSSGSVSTAYFPSWYQQTPGQAPRTLIYGTNTRSSGVPDRFSGSILGNKAALTITGAQADDESDYYCVLYMGRGIVVFGGGTKLTVLGGSSGEIVMTQSPAILSVSPGERATLSCRASQSVAINLAWYQQKPGQAPRLLIYAASSRATGIPGRFSGSGSETNFTLTISSLQSGDFAVYYCQQYITWPPSYTFGQGTKLEIKGGGGSGGSGSGGGGSASGSGEVQLVESGGALIQPGGSLRLSCAASGIIVSANYMSWVRQAPGKGLEWVSVIYSGGSTFYADSVKGRFTISRDNSKNTLYLEMNSLRAEDTAVYYCARDAPILGVSDWGQGTLVTVSSGGSSGQVQLVESGGGVVQPGRSLRLSCAASGFTLSSYGMHWVRQAPGKGLEWVAVISYDGSNKYYVDSVKGRFTISRDNSKNTLYLQMNSLRAEDTAVYYCRWAYWELLPDYYYGMDVWGQGTTVTVSSASGGSGDKTHTCPPCPAPELLGGPSVFLFPPKPKDTLMISRTPEVTCVVVDVSHEDPEVKFNWYVDGVEVHNAKTKPREEQYNSYVVSVLTVLHQDWLNGKEYKCKVSNKALPAPIEKTISKAKGQPREPQVYTLPPSRDELTKNQVSLTCLVKGFYPSDIAVEWESNGQPENNYKTTPPVLDSDGSFFKKLTVDKSRWQQGNVFSCSVLHEALHSHYTQKSLSLSPG

SEQ ID NO: 300 - DNA, 2172 bp, synthetic construct
  misc_feature 1..2172: note = MX1021
  source 1..2172: mol_type = other DNA
cagaccgtggtcacacaagagcctagctttagcgtgtcccctggcggcacagtgacactgacatgtggactttctagcggatctgtgtccaccgcctactttcccagctggtatcaacagaccccaggccaggcacctcggacactgatctacggcaccaacacaagatccagcggcgtgcccgataggttcagcggatctatcctgggcaacaaggccgcactgactatcacaggcgcccaggccgatgacgagagcgattactactgcgtgctgtacatgggcagaggcatcgtggtttttggcggaggcaccaagctgacagtgcttggcggatcctctggagagatcgtgatgacacagagccccgccatcctgagtgtgtctccaggcgaaagagccacactgagctgtagagcctctcagagcgtggccatcaacctggcctggtatcagcagaagcctggacaggctccccggctgctgatctatgccgcttcttctagagccacaggcatccctggcagattttctggcagcggcagcgagacaaacttcaccctgaccatcagctccctgcagagcggcgatttcgccgtgtactactgccagcagtacatcacctggccacctagctacacctttggccagggcaccaagctggaaatcaaaggaggtggtggctctggcggatctgggagtggtggcggaggctctgcttctggatctggagaagtgcagctggtggaaagtggcggagcactgattcagcctggcggctctctgagactgtcttgtgccgcctctggcatcatcgtgtccgccaactacatgagctgggtccgacaggcccctggcaaaggacttgaatgggtgtccgtgatctacagcggcggcagcaccttttacgccgactctgtgaagggcagattcaccatcagccgggacaacagcaagaacaccctgtacctggaaatgaacagcctgagagccgaggacaccgctgtgtactattgcgccagagatgcccctatcctgggcgtgtcagattggggccagggaacactggtcacagtgtctagcggaggcagctccgggcaggtccagcttgttgaaagtggcggaggggttgtgcaacccggaagatctctgagactgtcttgcgccgccagcggctttacactgtcctcttatggaatgcattgggttcgacaagctcccggcaagggactcgaatgggttgcagtgatttcctacgatggctccaacaagtattatgtcgactccgtgaaaggccggttcacaatctccagagacaactccaagaatacgctctatctccagatgaacagcctgcgggccgaagatacagccgtgtattactgcgctcgcggatgggcttactgggaactgctccctgattactattacggaatggacgtctggggacagggaacaaccgtgaccgttagctctgcttctggcggctccggagataagacccacacatgtcctccatgtcctgctccagaactgctcggcggcccttctgtgttcctgtttcctccaaagcctaaggacaccctgatgatcagcagaacccctgaagtgacctgcgtggtggtggatgtgtctcacgaggaccccgaagtgaagttcaattggtacgtggacggcgtggaagtgcacaacgccaagaccaagcctagagaggaacagtacaacagcacctacagagtggtgtccgtgctgaccgtgctgcaccaggattggctgaacggcaaagagtacaagtgcaaggtgtccaacaaggccctgcctgctcctatcgagaaaaccatcagcaaggccaagggccagcctagggaaccccaggtttacacccttcctccaagccgggatgagctgaccaagaaccaggtgtccctgacatgtctcgtgaagggcttctaccccagcgacattgccgtggaatgggagagcaatggccagcctgagaacaactacaagacaacccctcctgtgctggacagcgacggctcattcttcctgtacagcaagctgacagtcgacaagtccagatggcagcagggcaacgtgttcagttgcagcgtgctgcacgaggccctgcacagtcactacacccagaagtccctgagcctgtctcctgga

SEQ ID NO: 301 - protein, 722 aa, synthetic construct
  REGION 1..722: note = MX1022
DTVMTQSPLSLPVTPGEPASISCRSSQSLLNSNGYNYLDWYVQKPGQSPQLLIYLGSNRASGVPDRFSGSGSGTDFTLKISRVEAEDVGVYYCMQPLQTPLFTFGPGTKVEIKGGSSGEIVMTQSPAILSVSPGERATLSCRASQSVAINLAWYQQKPGQAPRLLIYAASSRATGIPGRFSGSGSETNFTLTISSLQSGDFAVYYCQQYITWPPSYTFGQGTKLEIKGGGGSGGSGSGGGGSASGSGEVQLVESGGALIQPGGSLRLSCAASGIIVSANYMSWVRQAPGKGLEWVSVIYSGGSTFYADSVKGRFTISRDNSKNTLYLEMNSLRAEDTAVYYCARDAPILGVSDWGQGTLVTVSSGGSSGQVTLRESGPALVKPTQTLTLTCTFSGFSLSTRGVCVSWIRQPPGKALEWLAFIDWDDDKYYNTSLKTRLTISKDTSKNQVVLTMTNVHPVDTATYYCARISSHHGSSWCTTFDYWGQGALVTVSAASGGSGDKTHTCPPCPAPELLGGPSVFLFPPKPKDTLMISRTPEVTCVVVDVSHEDPEVKFNWYVDGVEVHNAKTKPREEQYNSYVVSVLTVLHQDWLNGKEYKCKVSNKALPAPIEKTISKAKGQPREPQVYTLPPSRDELTKNQVSLTCLVKGFYPSDIAVEWESNGQPENNYKTTPPVLDSDGSFFKKLTVDKSRWQQGNVFSCSVLHEALHSHYTQKSLSLSPG

SEQ ID NO: 302 - DNA, 2178 bp, synthetic construct
  misc_feature 1..2178: note = MX1022
  source 1..2178: mol_type = other DNA
gacaccgtgatgacacagagccctctgagcctgcctgtgacacctggcgaacctgccagcatcagctgtagaagcagccagagcctgctgaacagcaacggctacaactacctggattggtacgtgcagaagcccggccagtctcctcagctgctgatctacctgggcagcaatagagccagcggcgtgcccgatagattttctggctctggcagcggcaccgacttcaccctgaagatctctagagtggaagccgaggacgtgggcgtgtactactgtatgcagcctctgcagacccctctgttcacatttggccctggcaccaaggtggaaatcaaaggcggatcctctggagagatcgtgatgacacagagccccgccatcctgagtgtgtctccaggcgaaagagccacactgagctgtagagcctctcagagcgtggccatcaacctggcctggtatcagcagaagcctggacaggctccccggctgctgatctatgccgcttcttctagagccacaggcatccctggcagattttctggcagcggcagcgagacaaacttcaccctgaccatcagctccctgcagagcggcgatttcgccgtgtactactgccagcagtacatcacctggccacctagctacacctttggccagggcaccaagctggaaatcaaaggaggtggtggctctggcggatctgggagtggtggcggaggctctgcttctggatctggagaagtgcagctggtggaaagtggcggagcactgattcagcctggcggctctctgagactgtcttgtgccgcctctggcatcatcgtgtccgccaactacatgagctgggtccgacaggcccctggcaaaggacttgaatgggtgtccgtgatctacagcggcggcagcaccttttacgccgactctgtgaagggcagattcaccatcagccgggacaacagcaagaacaccctgtacctggaaatgaacagcctgagagccgaggacaccgctgtgtactattgcgccagagatgcccctatcctgggcgtgtcagattggggccagggaacactggtcacagtgtctagcggaggcagctccgggcaagtgacactgagagagtctggccccgctctggtcaagcctacacagaccctgacactgacctgcaccttcagcggcttcagcctgtctactagaggcgtgtgcgtgtcctggatcagacagcctcctggaaaggccctggaatggctggccttcatcgactgggacgacgacaagtactacaacaccagcctgaaaacccggctgaccatcagcaaggacaccagcaagaaccaggtggtgctgaccatgaccaacgtgcaccctgtggataccgccacctactactgcgccagaatcagctctcaccacggctccagctggtgtaccaccttcgattattggggccagggcgctctcgtgacagtttctgctgcttctggcggctccggagataagacccacacatgtcctccatgtcctgctccagaactgctcggcggcccttctgtgttcctgtttcctccaaagcctaaggacaccctgatgatcagcagaacccctgaagtgacctgcgtggtggtggatgtgtctcacgaggaccccgaagtgaagttcaattggtacgtggacggcgtggaagtgcacaacgccaagaccaagcctagagaggaacagtacaacagcacctacagagtggtgtccgtgctgaccgtgctgcaccaggattggctgaacggcaaagagtacaagtgcaaggtgtccaacaaggccctgcctgctcctatcgagaaaaccatcagcaaggccaagggccagcctagggaaccccaggtttacacccttcctccaagccgggatgagctgaccaagaaccaggtgtccctgacatgtctcgtgaagggcttctaccccagcgacattgccgtggaatgggagagcaatggccagcctgagaacaactacaagacaacccctcctgtgctggacagcgacggctcattcttcctgtacagcaagctgacagtcgacaagtccagatggcagcagggcaacgtgttcagttgcagcgtgctgcacgaggccctgcacagtcactacacccagaagtccctgagcctgtctcctgga

SEQ ID NO: 303 - protein, 718 aa, synthetic construct
  REGION 1..718: note = MX1023
EIVMTQSPAILSVSPGERATLSCRASQSVAINLAWYQQKPGQAPRLLIYAASSRATGIPGRFSGSGSETNFTLTISSLQSGDFAVYYCQQYITWPPSYTFGQGTKLEIKGGSSGQTVVTQEPSFSVSPGGTVTLTCGLSSGSVSTAYFPSWYQQTPGQAPRTLIYGTNTRSSGVPDRFSGSILGNKAALTITGAQADDESDYYCVLYMGRGIVVFGGGTKLTVLGGGGSGGSGSGGGGSASGSGQVQLVESGGGVVQPGRSLRLSCAASGFTLSSYGMHWVRQAPGKGLEWVAVISYDGSNKYYVDSVKGRFTISRDNSKNTLYLQMNSLRAEDTAVYYCRWAYWELLPDYYYGMDVWGQGTTVTVSSGGSSGEVQLVESGGALIQPGGSLRLSCAASGIIVSANYMSWVRQAPGKGLEWVSVIYSGGSTFYADSVKGRFTISRDNSKNTLYLEMNSLRAEDTAVYYCARDAPILGVSDWGQGTLVTVSSASGGSGDKTHTCPPCPAPELLGGPSVFLFPPKPKDTLMISRTPEVTCVVVDVSHEDPEVKFNWYVDGVEVHNAKTKPREEQYNSYVVSVLTVLHQDWLNGKEYKCKVSNKALPAPIEKTISKAKGQPREPQVYTLPPSRDELTKNQVSLTCLVKGFYPSDIAVEWESNGQPENNYKTTPPVLDSDGSFFKKLTVDKSRWQQGNVFSCSVLHEALHSHYTQKSLSLSPG

SEQ ID NO: 304 - DNA, 2172 bp, synthetic construct
  misc_feature 1..2172: note = MX1023
  source 1..2172: mol_type = other DNA
gagatcgtgatgacacagagccccgccatcctgagtgtgtctccaggcgaaagagccacactgagctgtagagcctctcagagcgtggccatcaacctggcctggtatcagcagaagcctggacaggctccccggctgctgatctatgccgcttcttctagagccacaggcatccctggcagattttctggcagcggcagcgagacaaacttcaccctgaccatcagctccctgcagagcggcgatttcgccgtgtactactgccagcagtacatcacctggccacctagctacacctttggccagggcaccaagctggaaatcaaaggcggatcctctggacagaccgtcgtgacccaagaaccatcctttagcgtgtccccaggcggaaccgtcactctgacttgtggactgtctagcggctccgtgtccacagcttacttcccgtcctggtatcaacaaacacccggccaggcacctagaactctgatctatgggaccaacactagaagctccggcgtgccagacaggttctctggcagcattctgggaaacaaagctgccctgaccattaccggcgctcaggctgatgatgagtctgactactattgcgtcctctatatgggacggggaatcgtggtgttcggaggcggcacaaaactgaccgttcttggaggtggtggctctggcggatctgggagtggtggcggaggctctgcttctggatctggacaggtccagctggttgaatctggtggcggagttgtgcagcctggcagaagcctgagactgtcttgtgccgcctctggctttaccctgagcagctatggcatgcactgggtccgacaggcccctggcaaaggacttgaatgggtcgccgtgatcagctacgacggcagcaacaagtactacgtggacagcgtgaagggcagattcaccatcagccgggacaacagcaagaacaccctgtacctgcagatgaacagcctgagagccgaggacacagccgtgtattattgcgccagaggctgggcctattgggagctgctgcctgactactactacggcatggatgtgtggggccagggaaccacagtgaccgtgtctagcggaggcagctccggggaagtgcagctggtggaaagtggcggagcactgattcagcctggcggctctctgagactgtcttgtgccgcctctggcatcatcgtgtccgccaactacatgagctgggtccgacaggcccctggcaaaggacttgaatgggtgtccgtgatctacagcggcggcagcaccttttacgccgactctgtgaagggcagattcaccatcagccgggacaacagcaagaacaccctgtacctggaaatgaacagcctgagagccgaggacaccgctgtgtactattgcgccagagatgcccctatcctgggcgtgtcagattggggccagggaacactggtcacagtgtctagcgcttctggcggctccggagataagacccacacatgtcctccatgtcctgctccagaactgctcggcggcccttctgtgttcctgtttcctccaaagcctaaggacaccctgatgatcagcagaacccctgaagtgacctgcgtggtggtggatgtgtctcacgaggaccccgaagtgaagttcaattggtacgtggacggcgtggaagtgcacaacgccaagaccaagcctagagaggaacagtacaacagcacctacagagtggtgtccgtgctgaccgtgctgcaccaggattggctgaacggcaaagagtacaagtgcaaggtgtccaacaaggccctgcctgctcctatcgagaaaaccatcagcaaggccaagggccagcctagggaaccccaggtttacacccttcctccaagccgggatgagctgaccaagaaccaggtgtccctgacatgtctcgtgaagggcttctaccccagcgacattgccgtggaatgggagagcaatggccagcctgagaacaactacaagacaacccctcctgtgctggacagcgacggctcattcttcctgtacagcaagctgacagtcgacaagtccagatggcagcagggcaacgtgttcagttgcagcgtgctgcacgaggccctgcacagtcactacacccagaagtccctgagcctgtctcctgga

SEQ ID NO: 305 - protein, 722 aa, synthetic construct
  REGION 1..722: note = MX1024
EIVMTQSPAILSVSPGERATLSCRASQSVAINLAWYQQKPGQAPRLLIYAASSRATGIPGRFSGSGSETNFTLTISSLQSGDFAVYYCQQYITWPPSYTFGQGTKLEIKGGSSGDTVMTQSPLSLPVTPGEPASISCRSSQSLLNSNGYNYLDWYVQKPGQSPQLLIYLGSNRASGVPDRFSGSGSGTDFTLKISRVEAEDVGVYYCMQPLQTPLFTFGPGTKVEIKGGGGSGGSGSGGGGSASGSGQVTLRESGPALVKPTQTLTLTCTFSGFSLSTRGVCVSWIRQPPGKALEWLAFIDWDDDKYYNTSLKTRLTISKDTSKNQVVLTMTNVHPVDTATYYCARISSHHGSSWCTTFDYWGQGALVTVSAGGSSGEVQLVESGGALIQPGGSLRLSCAASGIIVSANYMSWVRQAPGKGLEWVSVIYSGGSTFYADSVKGRFTISRDNSKNTLYLEMNSLRAEDTAVYYCARDAPILGVSDWGQGTLVTVSSASGGSGDKTHTCPPCPAPELLGGPSVFLFPPKPKDTLMISRTPEVTCVVVDVSHEDPEVKFNWYVDGVEVHNAKTKPREEQYNSYVVSVLTVLHQDWLNGKEYKCKVSNKALPAPIEKTISKAKGQPREPQVYTLPPSRDELTKNQVSLTCLVKGFYPSDIAVEWESNGQPENNYKTTPPVLDSDGSFFKKLTVDKSRWQQGNVFSCSVLHEALHSHYTQKSLSLSPG

SEQ ID NO: 306 - DNA, 2178 bp, synthetic construct
  misc_feature 1..2178: note = MX1024
  source 1..2178: mol_type = other DNA
gagatcgtgatgacacagagccccgccatcctgagtgtgtctccaggcgaaagagccacactgagctgtagagcctctcagagcgtggccatcaacctggcctggtatcagcagaagcctggacaggctccccggctgctgatctatgccgcttcttctagagccacaggcatccctggcagattttctggcagcggcagcgagacaaacttcaccctgaccatcagctccctgcagagcggcgatttcgccgtgtactactgccagcagtacatcacctggccacctagctacacctttggccagggcaccaagctggaaatcaaaggcggatcctctggagacaccgtgatgacacagagccctctgagcctgcctgtgacacctggcgaacctgccagcatcagctgtagaagcagccagagcctgctgaacagcaacggctacaactacctggattggtacgtgcagaagcccggccagtctcctcagctgctgatctacctgggcagcaatagagccagcggcgtgcccgatagattttctggctctggcagcggcaccgacttcaccctgaagatctctagagtggaagccgaggacgtgggcgtgtactactgtatgcagcctctgcagacccctctgttcacatttggccctggcaccaaggtggaaatcaaaggaggtggtggctctggcggatctgggagtggtggcggaggctctgcttctggatctggacaagtgacactgagagagtctggccccgctctggtcaagcctacacagaccctgacactgacctgcaccttcagcggcttcagcctgtctactagaggcgtgtgcgtgtcctggatcagacagcctcctggaaaggccctggaatggctggccttcatcgactgggacgacgacaagtactacaacaccagcctgaaaacccggctgaccatcagcaaggacaccagcaagaaccaggtggtgctgaccatgaccaacgtgcaccctgtggataccgccacctactactgcgccagaatcagctctcaccacggctccagctggtgtaccaccttcgattattggggccagggcgctctcgtgacagtttctgctggaggcagctccggggaagtgcagctggtggaaagtggcggagcactgattcagcctggcggctctctgagactgtcttgtgccgcctctggcatcatcgtgtccgccaactacatgagctgggtccgacaggcccctggcaaaggacttgaatgggtgtccgtgatctacagcggcggcagcaccttttacgccgactctgtgaagggcagattcaccatcagccgggacaacagcaagaacaccctgtacctggaaatgaacagcctgagagccgaggacaccgctgtgtactattgcgccagagatgcccctatcctgggcgtgtcagattggggccagggaacactggtcacagtgtctagcgcttctggcggctccggagataagacccacacatgtcctccatgtcctgctccagaactgctcggcggcccttctgtgttcctgtttcctccaaagcctaaggacaccctgatgatcagcagaacccctgaagtgacctgcgtggtggtggatgtgtctcacgaggaccccgaagtgaagttcaattggtacgtggacggcgtggaagtgcacaacgccaagaccaagcctagagaggaacagtacaacagcacctacagagtggtgtccgtgctgaccgtgctgcaccaggattggctgaacggcaaagagtacaagtgcaaggtgtccaacaaggccctgcctgctcctatcgagaaaaccatcagcaaggccaagggccagcctagggaaccccaggtttacacccttcctccaagccgggatgagctgaccaagaaccaggtgtccctgacatgtctcgtgaagggcttctaccccagcgacattgccgtggaatgggagagcaatggccagcctgagaacaactacaagacaacccctcctgtgctggacagcgacggctcattcttcctgtacagcaagctgacagtcgacaagtccagatggcagcagggcaacgtgttcagttgcagcgtgctgcacgaggccctgcacagtcactacacccagaagtccctgagcctgtctcctgga

SEQ ID NO: 307 - protein, 718 aa, synthetic construct
  REGION 1..718: note = MX1027
EIVMTQSPAILSVSPGERATLSCRASQSVAINLAWYQQKPGQAPRLLIYAASSRATGIPGRFSGSGSETNFTLTISSLQSGDFAVYYCQQYITWPPSYTFGQGTKLEIKGGSSGQTVVTQEPSFSVSPGGTVTLTCGLSSGSVSTAYFPSWYQQTPGQAPRTLIYGTNTRSSGVPDRFSGSILGNKAALTITGAQADDESDYYCVLYMGRGIVVFGGGTKLTVLGGGGSGGSGSGGGGSASGSGQVQLVESGGGVVQPGRSLRLSCAASGFTLSSYGMHWVRQAPGKGLEWVAVISYDGSNKYYVDSVKGRFTISRDNSKNTLYLQMNSLRAEDTAVYYCRWAYWELLPDYYYGMDVWGQGTTVTVSSGGSSGEVQLVESGGALIQPGGSLRLSCAASGIIVSANYMSWVRQAPGKGLEWVSVIYSGGSTFYADSVKGRFTISRDNSKNTLYLEMNSLRAEDTAVYYCARDAPILGVSDWGQGTLVTVSSASGGSGDKTHTCPPCPAPELLGGPSVFLFPPKPKDTLMISRTPEVTCVVVDVSHEDPEVKFNWYVDGVEVHNAKTKPREEQYNSYVVSVLTVLHQDWLNGKEYKCKVSNKALPAPIEKTISKAKGQPREPQVYTLPPCRDELTKNQVSLWCLVKGFYPSDIAVEWESNGQPENNYKTTPPVLDSDGSFFKKLTVDKSRWQQGNVFSCSVLHEALHSHYTQKSLSLSPG

SEQ ID NO: 308 - DNA, 2172 bp, synthetic construct
  misc_feature 1..2172: note = MX1027
  source 1..2172: mol_type = other DNA
gagatcgtgatgacacagagccccgccatcctgagtgtgtctccaggcgaaagagccacactgagctgtagagcctctcagagcgtggccatcaacctggcctggtatcagcagaagcctggacaggctccccggctgctgatctatgccgcttcttctagagccacaggcatccctggcagattttctggcagcggcagcgagacaaacttcaccctgaccatcagctccctgcagagcggcgatttcgccgtgtactactgccagcagtacatcacctggccacctagctacacctttggccagggcaccaagctggaaatcaaaggcggatcctctggacagaccgtcgtgacccaagaaccatcctttagcgtgtccccaggcggaaccgtcactctgacttgtggactgtctagcggctccgtgtccacagcttacttcccgtcctggtatcaacaaacacccggccaggcacctagaactctgatctatgggaccaacactagaagctccggcgtgccagacaggttctctggcagcattctgggaaacaaagctgccctgaccattaccggcgctcaggctgatgatgagtctgactactattgcgtcctctatatgggacggggaatcgtggtgttcggaggcggcacaaaactgaccgttcttggaggtggtggctctggcggatctgggagtggtggcggaggctctgcttctggatctggacaggtccagctggttgaatctggtggcggagttgtgcagcctggcagaagcctgagactgtcttgtgccgcctctggctttaccctgagcagctatggcatgcactgggtccgacaggcccctggcaaaggacttgaatgggtcgccgtgatcagctacgacggcagcaacaagtactacgtggacagcgtgaagggcagattcaccatcagccgggacaacagcaagaacaccctgtacctgcagatgaacagcctgagagccgaggacacagccgtgtattattgcgccagaggctgggcctattgggagctgctgcctgactactactacggcatggatgtgtggggccagggaaccacagtgaccgtgtctagcggaggcagctccggggaagtgcagctggtggaaagtggcggagcactgattcagcctggcggctctctgagactgtcttgtgccgcctctggcatcatcgtgtccgccaactacatgagctgggtccgacaggcccctggcaaaggacttgaatgggtgtccgtgatctacagcggcggcagcaccttttacgccgactctgtgaagggcagattcaccatcagccgggacaacagcaagaacaccctgtacctggaaatgaacagcctgagagccgaggacaccgctgtgtactattgcgccagagatgcccctatcctgggcgtgtcagattggggccagggaacactggtcacagtgtctagcgcttctggcggctccggagataagacccacacatgtcctccatgtcctgctccagaactgctcggcggcccttctgtgttcctgtttcctccaaagcctaaggacaccctgatgatcagcagaacccctgaagtgacctgcgtggtggtggatgtgtctcacgaggaccccgaagtgaagttcaattggtacgtggacggcgtggaagtgcacaacgccaagaccaagcctagagaggaacagtacaacagcacctacagagtggtgtccgtgctgaccgtgctgcaccaggattggctgaacggcaaagagtacaagtgcaaggtgtccaacaaggccctgcctgctcctatcgagaaaaccatcagcaaggccaagggccagcctagggaaccccaggtttacacccttcctccatgccgggatgagctgaccaagaaccaggtgtccctgtggtgtctcgtgaagggcttctaccccagcgacattgccgtggaatgggagagcaatggccagcctgagaacaactacaagacaacccctcctgtgctggacagcgacggctcattcttcctgtacagcaagctgacagtcgacaagtccagatggcagcagggcaacgtgttcagttgcagcgtgctgcacgaggccctgcacagtcactacacccagaagtccctgagcctgtctcctgga

SEQ ID NO: 309 - protein, 720 aa, synthetic construct
  REGION 1..720: note = MX1027
QTVVTQEPSFSVSPGGTVTLTCGLSSGSVSTAYFPSWYQQTPGQAPRTLIYGTNTRSSGVPDRFSGSILGNKAALTITGAQADDESDYYCVLYMGRGIVVFGGGTKLTVLGGSSGEIVMTQSPAILSVSPGERATLSCRASQSVAINLAWYQQKPGQAPRLLIYAASSRATGIPGRFSGSGSETNFTLTISSLQSGDFAVYYCQQYITWPPSYTFGQGTKLEIKGGGGSGGSGSGGGGSASGSGEVQLVESGGALIQPGGSLRLSCAASGIIVSANYMSWVRQAPGKGLEWVSVIYSGGSTFYADSVKGRFTISRDNSKNTLYLEMNSLRAEDTAVYYCARDAPILGVSDWGQGTLVTVSSGGSSGQVQLVESGGGVVQPGRSLRLSCAASGFTLSSYGMHWVRQAPGKGLEWVAVISYDGSNKYYVDSVKGRFTISRDNSKNTLYLQMNSLRAEDTAVYYCRWAYWELLPDYYYGMDVWGQGTTVTVSSASGGSGDKTHTCPPCPAPELLGGPSVFLFPPKPKDTLMISRTPEVTCVVVDVSHEDPEVKFNWYVDGVEVHNAKTKPREEQYNSYVVSVLTVLHQDWLNGKEYKCKVSNKALPAPIEKTISKAKGQPREPQVCTLPPSRDELTKNQVSLSCAVKGFYPSDIAVEWESNGQPENNYKTTPPVLDSDGSFFLVSKLTVDKSRWQQGNVFSCSVLHEALHSHYTQKSLSLSPG

SEQ ID NO: 310 - DNA, 2172 bp, synthetic construct
  misc_feature 1..2172: note = MX1027
  source 1..2172: mol_type = other DNA
cagaccgtggtcacacaagagcctagctttagcgtgtcccctggcggcacagtgacactgacatgtggactttctagcggatctgtgtccaccgcctactttcccagctggtatcaacagaccccaggccaggcacctcggacactgatctacggcaccaacacaagatccagcggcgtgcccgataggttcagcggatctatcctgggcaacaaggccgcactgactatcacaggcgcccaggccgatgacgagagcgattactactgcgtgctgtacatgggcagaggcatcgtggtttttggcggaggcaccaagctgacagtgcttggcggatcctctggagagatcgtgatgacacagagccccgccatcctgagtgtgtctccaggcgaaagagccacactgagctgtagagcctctcagagcgtggccatcaacctggcctggtatcagcagaagcctggacaggctccccggctgctgatctatgccgcttcttctagagccacaggcatccctggcagattttctggcagcggcagcgagacaaacttcaccctgaccatcagctccctgcagagcggcgatttcgccgtgtactactgccagcagtacatcacctggccacctagctacacctttggccagggcaccaagctggaaatcaaaggaggtggtggctctggcggatctgggagtggtggcggaggctctgcttctggatctggagaagtgcagctggtggaaagtggcggagcactgattcagcctggcggctctctgagactgtcttgtgccgcctctggcatcatcgtgtccgccaactacatgagctgggtccgacaggcccctggcaaaggacttgaatgggtgtccgtgatctacagcggcggcagcaccttttacgccgactctgtgaagggcagattcaccatcagccgggacaacagcaagaacaccctgtacctggaaatgaacagcctgagagccgaggacaccgctgtgtactattgcgccagagatgcccctatcctgggcgtgtcagattggggccagggaacactggtcacagtgtctagcggaggcagctccgggcaggtccagcttgttgaaagtggcggaggggttgtgcaacccggaagatctctgagactgtcttgcgccgccagcggctttacactgtcctcttatggaatgcattgggttcgacaagctcccggcaagggactcgaatgggttgcagtgatttcctacgatggctccaacaagtattatgtcgactccgtgaaaggccggttcacaatctccagagacaactccaagaatacgctctatctccagatgaacagcctgcgggccgaagatacagccgtgtattactgcgctcgcggatgggcttactgggaactgctccctgattactattacggaatggacgtctggggacagggaacaaccgtgaccgttagctctgcttctggcggctccggagataagacccacacatgtcctccatgtcctgctccagaactgctcggcggcccttctgtgttcctgtttcctccaaagcctaaggacaccctgatgatcagcagaacccctgaagtgacctgcgtggtggtggatgtgtctcacgaggaccccgaagtgaagttcaattggtacgtggacggcgtggaagtgcacaacgccaagaccaagcctagagaggaacagtacaacagcacctacagagtggtgtccgtgctgaccgtgctgcaccaggattggctgaacggcaaagagtacaagtgcaaggtgtccaacaaggccctgcctgctcctatcgagaaaaccatcagcaaggccaagggccagcctagggaaccccaggtttgtacccttcctccaagccgggatgagctgaccaagaaccaggtgtccctgagctgtgccgtgaagggcttctaccccagcgacattgccgtggaatgggagagcaatggccagcctgagaacaactacaagacaacccctcctgtgctggacagcgacggctcattcttcctggtgagcaagctgacagtcgacaagtccagatggcagcagggcaacgtgttcagttgcagcgtgctgcacgaggccctgcacagtcactacacccagaagtccctgagcctgtctcctgga

SEQ ID NO: 311 - protein, 722 aa, synthetic construct
  REGION 1..722: note = MX1028
EIVMTQSPAILSVSPGERATLSCRASQSVAINLAWYQQKPGQAPRLLIYAASSRATGIPGRFSGSGSETNFTLTISSLQSGDFAVYYCQQYITWPPSYTFGQGTKLEIKGGSSGDTVMTQSPLSLPVTPGEPASISCRSSQSLLNSNGYNYLDWYVQKPGQSPQLLIYLGSNRASGVPDRFSGSGSGTDFTLKISRVEAEDVGVYYCMQPLQTPLFTFGPGTKVEIKGGGGSGGSGSGGGGSASGSGQVTLRESGPALVKPTQTLTLTCTFSGFSLSTRGVCVSWIRQPPGKALEWLAFIDWDDDKYYNTSLKTRLTISKDTSKNQVVLTMTNVHPVDTATYYCARISSHHGSSWCTTFDYWGQGALVTVSAGGSSGEVQLVESGGALIQPGGSLRLSCAASGIIVSANYMSWVRQAPGKGLEWVSVIYSGGSTFYADSVKGRFTISRDNSKNTLYLEMNSLRAEDTAVYYCARDAPILGVSDWGQGTLVTVSSASGGSGDKTHTCPPCPAPELLGGPSVFLFPPKPKDTLMISRTPEVTCVVVDVSHEDPEVKFNWYVDGVEVHNAKTKPREEQYNSYVVSVLTVLHQDWLNGKEYKCKVSNKALPAPIEKTISKAKGQPREPQVYTLPPCRDELTKNQVSLWCLVKGFYPSDIAVEWESNGQPENNYKTTPPVLDSDGSFFKKLTVDKSRWQQGNVFSCSVLHEALHSHYTQKSLSLSPG

SEQ ID NO: 312 - DNA, 2178 bp, synthetic construct
  misc_feature 1..2178: note = MX1028
  source 1..2178: mol_type = other DNA
gagatcgtgatgacacagagccccgccatcctgagtgtgtctccaggcgaaagagccacactgagctgtagagcctctcagagcgtggccatcaacctggcctggtatcagcagaagcctggacaggctccccggctgctgatctatgccgcttcttctagagccacaggcatccctggcagattttctggcagcggcagcgagacaaacttcaccctgaccatcagctccctgcagagcggcgatttcgccgtgtactactgccagcagtacatcacctggccacctagctacacctttggccagggcaccaagctggaaatcaaaggcggatcctctggagacaccgtgatgacacagagccctctgagcctgcctgtgacacctggcgaacctgccagcatcagctgtagaagcagccagagcctgctgaacagcaacggctacaactacctggattggtacgtgcagaagcccggccagtctcctcagctgctgatctacctgggcagcaatagagccagcggcgtgcccgatagattttctggctctggcagcggcaccgacttcaccctgaagatctctagagtggaagccgaggacgtgggcgtgtactactgtatgcagcctctgcagacccctctgttcacatttggccctggcaccaaggtggaaatcaaaggaggtggtggctctggcggatctgggagtggtggcggaggctctgcttctggatctggacaagtgacactgagagagtctggccccgctctggtcaagcctacacagaccctgacactgacctgcaccttcagcggcttcagcctgtctactagaggcgtgtgcgtgtcctggatcagacagcctcctggaaaggccctggaatggctggccttcatcgactgggacgacgacaagtactacaacaccagcctgaaaacccggctgaccatcagcaaggacaccagcaagaaccaggtggtgctgaccatgaccaacgtgcaccctgtggataccgccacctactactgcgcgagaatcagctctcaccacggctccagctggtgtaccaccttcgattattggggccagggcgctctcgtgacagtttctgctggaggcagctccggggaagtgcagctggtggaaagtggcggagcactgattcagcctggcggctctctgagactgtcttgtgccgcctctggcatcatcgtgtccgccaactacatgagctgggtccgacaggcccctggcaaaggacttgaatgggtgtccgtgatctacagcggcggcagcaccttttacgccgactctgtgaagggcagattcaccatcagccgggacaacagcaagaacaccctgtacctggaaatgaacagcctgagagccgaggacaccgctgtgtactattgcgccagagatgcccctatcctgggcgtgtcagattggggccagggaacactggtcacagtgtctagcgcttctggcggctccggagataagacccacacatgtcctccatgtcctgctccagaactgctcggcggcccttctgtgttcctgtttcctccaaagcctaaggacaccctgatgatcagcagaacccctgaagtgacctgcgtggtggtggatgtgtctcacgaggaccccgaagtgaagttcaattggtacgtggacggcgtggaagtgcacaacgccaagaccaagcctagagaggaacagtacaacagcacctacagagtggtgtccgtgctgaccgtgctgcaccaggattggctgaacggcaaagagtacaagtgcaaggtgtccaacaaggccctgcctgctcctatcgagaaaaccatcagcaaggccaagggccagcctagggaaccccaggtttacacccttcctccatgccgggatgagctgaccaagaaccaggtgtccctgtggtgtctcgtgaagggcttctaccccagcgacattgccgtggaatgggagagcaatggccagcctgagaacaactacaagacaacccctcctgtgctggacagcgacggctcattcttcctgtacagcaagctgacagtcgacaagtccagatggcagcagggcaacgtgttcagttgcagcgtgctgcacgaggccctgcacagtcactacacccagaagtccctgagcctgtctcctgga

SEQ ID NO: 313 - protein, 724 aa, synthetic construct
  REGION 1..724: note = MX1028
DTVMTQSPLSLPVTPGEPASISCRSSQSLLNSNGYNYLDWYVQKPGQSPQLLIYLGSNRASGVPDRFSGSGSGTDFTLKISRVEAEDVGVYYCMQPLQTPLFTFGPGTKVEIKGGSSGEIVMTQSPAILSVSPGERATLSCRASQSVAINLAWYQQKPGQAPRLLIYAASSRATGIPGRFSGSGSETNFTLTISSLQSGDFAVYYCQQYITWPPSYTFGQGTKLEIKGGGGSGGSGSGGGGSASGSGEVQLVESGGALIQPGGSLRLSCAASGIIVSANYMSWVRQAPGKGLEWVSVIYSGGSTFYADSVKGRFTISRDNSKNTLYLEMNSLRAEDTAVYYCARDAPILGVSDWGQGTLVTVSSGGSSGQVTLRESGPALVKPTQTLTLTCTFSGFSLSTRGVCVSWIRQPPGKALEWLAFIDWDDDKYYNTSLKTRLTISKDTSKNQVVLTMTNVHPVDTATYYCARISSHHGSSWCTTFDYWGQGALVTVSAASGGSGDKTHTCPPCPAPELLGGPSVFLFPPKPKDTLMISRTPEVTCVVVDVSHEDPEVKFNWYVDGVEVHNAKTKPREEQYNSYVVSVLTVLHQDWLNGKEYKCKVSNKALPAPIEKTISKAKGQPREPQVCTLPPSRDELTKNQVSLSCAVKGFYPSDIAVEWESNGQPENNYKTTPPVLDSDGSFFLVSKLTVDKSRWQQGNVFSCSVLHEALHSHYTQKSLSLSPG

SEQ ID NO: 314 - DNA, 2178 bp, synthetic construct
  misc_feature 1..2178: note = MX1028
  source 1..2178: mol_type = other DNA
gacaccgtgatgacacagagccctctgagcctgcctgtgacacctggcgaacctgccagcatcagctgtagaagcagccagagcctgctgaacagcaacggctacaactacctggattggtacgtgcagaagcccggccagtctcctcagctgctgatctacctgggcagcaatagagccagcggcgtgcccgatagattttctggctctggcagcggcaccgacttcaccctgaagatctctagagtggaagccgaggacgtgggcgtgtactactgtatgcagcctctgcagacccctctgttcacatttggccctggcaccaaggtggaaatcaaaggcggatcctctggagagatcgtgatgacacagagccccgccatcctgagtgtgtctccaggcgaaagagccacactgagctgtagagcctctcagagcgtggccatcaacctggcctggtatcagcagaagcctggacaggctccccggctgctgatctatgccgcttcttctagagccacaggcatccctggcagattttctggcagcggcagcgagacaaacttcaccctgaccatcagctccctgcagagcggcgatttcgccgtgtactactgccagcagtacatcacctggccacctagctacacctttggccagggcaccaagctggaaatcaaaggaggtggtggctctggcggatctgggagtggtggcggaggctctgcttctggatctggagaagtgcagctggtggaaagtggcggagcactgattcagcctggcggctctctgagactgtcttgtgccgcctctggcatcatcgtgtccgccaactacatgagctgggtccgacaggcccctggcaaaggacttgaatgggtgtccgtgatctacagcggcggcagcaccttttacgccgactctgtgaagggcagattcaccatcagccgggacaacagcaagaacaccctgtacctggaaatgaacagcctgagagccgaggacaccgctgtgtactattgcgccagagatgcccctatcctgggcgtgtcagattggggccagggaacactggtcacagtgtctagcggaggcagctccgggcaagtgacactgagagagtctggccccgctctggtcaagcctacacagaccctgacactgacctgcaccttcagcggcttcagcctgtctactagaggcgtgtgcgtgtcctggatcagacagcctcctggaaaggccctggaatggctggccttcatcgactgggacgacgacaagtactacaacaccagcctgaaaacccggctgaccatcagcaaggacaccagcaagaaccaggtggtgctgaccatgaccaacgtgcaccctgtggataccgccacctactactgcgccagaatcagctctcaccacggctccagctggtgtaccaccttcgattattggggccagggcgctctcgtgacagtttctgctgcttctggcggctccggagataagacccacacatgtcctccatgtcctgctccagaactgctcggcggcccttctgtgttcctgtttcctccaaagcctaaggacaccctgatgatcagcagaacccctgaagtgacctgcgtggtggtggatgtgtctcacgaggaccccgaagtgaagttcaattggtacgtggacggcgtggaagtgcacaacgccaagaccaagcctagagaggaacagtacaacagcacctacagagtggtgtccgtgctgaccgtgctgcaccaggattggctgaacggcaaagagtacaagtgcaaggtgtccaacaaggccctgcctgctcctatcgagaaaaccatcagcaaggccaagggccagcctagggaaccccaggtttgtacccttcctccaagccgggatgagctgaccaagaaccaggtgtccctgagctgtgccgtgaagggcttctaccccagcgacattgccgtggaatgggagagcaatggccagcctgagaacaactacaagacaacccctcctgtgctggacagcgacggctcattcttcctggtgagcaagctgacagtcgacaagtccagatggcagcagggcaacgtgttcagttgcagcgtgctgcacgaggccctgcacagtcactacacccagaagtccctgagcctgtctcctgga

SEQ ID NO: 315 - protein, 718 aa, synthetic construct
  REGION 1..718: note = MX1041
QTVVTQEPSFSVSPGGTVTLTCGLSSGSVSTAYFPSWYQQTPGQAPRTLIYGTNTRSSGVPDRFSGSILGNKAALTITGAQADDESDYYCVLYMGRGIVVFGGGTKLTVLGGSSGEIVLTQSPGTLSLSPGETATLSCRASQSFSSDLAWYQQKPGQAPRLLIYGASSRATGIPDRFSGSGSGTDFTLTISRLEPADFAVYYCQQYGSSPPVTFGGGTKVEIKGGGGSGGSGSGGGGSASGSGEVQLVESGGGLIQPGGSLRLSCAASGVIVSYNYMNWVRQAPGKGLEWVSVIYSGGSTFYADSVRGRFTISRDNSKNTLYLQMNSLRAEDTAVYYCARDLGPAGAFDIWGLGTMVTVSSGGSSGQVQLVESGGGVVQPGRSLRLSCAASGFTLSSYGMHWVRQAPGKGLEWVAVISYDGSNKYYVDSVKGRFTISRDNSKNTLYLQMNSLRAEDTAVYYCRWAYWELLPDYYYGMDVWGQGTTVTVSSASGGSGDKTHTCPPCPAPELLGGPSVFLFPPKPKDTLMISRTPEVTCVVVDVSHEDPEVKFNWYVDGVEVHNAKTKPREEQYNSYVVSVLTVLHQDWLNGKEYKCKVSNKALPAPIEKTISKAKGQPREPQVYTLPPSRDELTKNQVSLTCLVKGFYPSDIAVEWESNGQPENNYKTTPPVLDSDGSFFKKLTVDKSRWQQGNVFSCSVLHEALHSHYTQKSLSLSPG

SEQ ID NO: 316 - DNA, 2172 bp, synthetic construct
  misc_feature 1..2172: note = MX1041
  source 1..2172: mol_type = other DNA
cagaccgtggtcacacaagagcctagctttagcgtgtcccctggcggcacagtgacactgacatgtggactttctagcggatctgtgtccaccgcctactttcccagctggtatcaacagaccccaggccaggcacctcggacactgatctacggcaccaacacaagatccagcggcgtgcccgataggttcagcggatctatcctgggcaacaaggccgcactgactatcacaggcgcccaggccgatgacgagagcgattactactgcgtgctgtacatgggcagaggcatcgtggtttttggcggaggcaccaagctgacagtgcttggcggatcctctggagagatcgtgctgacacagagccctggcacactgtcactgtctccaggcgaaacagccacactgagctgtagagccagccagagcttcagcagcgacctggcttggtatcagcagaagcctggacaggcccctcggctgttgatctatggcgcctcttctagagccacaggcatccccgatagattcagcggctctggcagcggcaccgatttcaccctgacaatcagcagactggaacccgccgacttcgccgtgtactactgtcagcagtacggcagcagccctcctgtgacatttggcggcggaacaaaggtggaaatcaaaggaggtggtggctctggcggatctgggagtggtggcggaggctctgcttctggatctggagaagtgcagctggtggaatcaggcggcggactgattcaacctggcggctctctgagactgtcttgtgctgcttctggcgtgatcgtgtcctacaactacatgaactgggtccgacaggctcccggcaaaggccttgaatgggtgtccgtgatctacagcggcggcagcaccttttacgccgattctgtgcggggcagattcaccatcagccgggacaacagcaagaacaccctgtacctgcagatgaacagcctgagagccgaggacaccgctgtgtactattgcgccagagatctgggacctgccggcgcttttgatatctggggcctgggcacaatggtcaccgtgtctagcggaggcagctccgggcaggtccagcttgttgaaagtggcggaggggttgtgcaacccggaagatctctgagactgtcttgcgccgccagcggctttacactgtcctcttatggaatgcattgggttcgacaagctcccggcaagggactcgaatgggttgcagtgatttcctacgatggctccaacaagtattatgtcgactccgtgaaaggccggttcacaatctccagagacaactccaagaatacgctctatctccagatgaacagcctgcgggccgaagatacagccgtgtattactgcgctcgcggatgggcttactgggaactgctccctgattactattacggaatggacgtctggggacagggaacaaccgtgaccgttagctctgcttctggcggctccggagataagacccacacatgtcctccatgtcctgctccagaactgctcggcggcccttctgtgttcctgtttcctccaaagcctaaggacaccctgatgatcagcagaacccctgaagtgacctgcgtggtggtggatgtgtctcacgaggaccccgaagtgaagttcaattggtacgtggacggcgtggaagtgcacaacgccaagaccaagcctagagaggaacagtacaacagcacctacagagtggtgtccgtgctgaccgtgctgcaccaggattggctgaacggcaaagagtacaagtgcaaggtgtccaacaaggccctgcctgctcctatcgagaaaaccatcagcaaggccaagggccagcctagggaaccccaggtttacacccttcctccaagccgggatgagctgaccaagaaccaggtgtccctgacatgtctcgtgaagggcttctaccccagcgacattgccgtggaatgggagagcaatggccagcctgagaacaactacaagacaacccctcctgtgctggacagcgacggctcattcttcctgtacagcaagctgacagtcgacaagtccagatggcagcagggcaacgtgttcagttgcagcgtgctgcacgaggccctgcacagtcactacacccagaagtccctgagcctgtctcctgga

SEQ ID NO: 317 - protein, 718 aa, synthetic construct
  REGION 1..718: note = MX1043
EIVLTQSPGTLSLSPGETATLSCRASQSFSSDLAWYQQKPGQAPRLLIYGASSRATGIPDRFSGSGSGTDFTLTISRLEPADFAVYYCQQYGSSPPVTFGGGTKVEIKGGSSGQTVVTQEPSFSVSPGGTVTLTCGLSSGSVSTAYFPSWYQQTPGQAPRTLIYGTNTRSSGVPDRFSGSILGNKAALTITGAQADDESDYYCVLYMGRGIVVFGGGTKLTVLGGGGSGGSGSGGGGSASGSGQVQLVESGGGVVQPGRSLRLSCAASGFTLSSYGMHWVRQAPGKGLEWVAVISYDGSNKYYVDSVKGRFTISRDNSKNTLYLQMNSLRAEDTAVYYCRWAYWELLPDYYYGMDVWGQGTTVTVSSGGSSGEVQLVESGGGLIQPGGSLRLSCAASGVIVSYNYMNWVRQAPGKGLEWVSVIYSGGSTFYADSVRGRFTISRDNSKNTLYLQMNSLRAEDTAVYYCARDLGPAGAFDIWGLGTMVTVSSASGGSGDKTHTCPPCPAPELLGGPSVFLFPPKPKDTLMISRTPEVTCVVVDVSHEDPEVKFNWYVDGVEVHNAKTKPREEQYNSYVVSVLTVLHQDWLNGKEYKCKVSNKALPAPIEKTISKAKGQPREPQVYTLPPSRDELTKNQVSLTCLVKGFYPSDIAVEWESNGQPENNYKTTPPVLDSDGSFFKKLTVDKSRWQQGNVFSCSVLHEALHSHYTQKSLSLSPG

SEQ ID NO: 318 - DNA, 2178 bp, synthetic construct
  misc_feature 1..2178: note = MX1043
  source 1..2178: mol_type = other DNA
gacaccgtgatgacacagagccctctgagcctgcctgtgacacctggcgaacctgccagcatcagctgtagaagcagccagagcctgctgaacagcaacggctacaactacctggattggtacgtgcagaagcccggccagtctcctcagctgctgatctacctgggcagcaatagagccagcggcgtgcccgatagattttctggctctggcagcggcaccgacttcaccctgaagatctctagagtggaagccgaggacgtgggcgtgtactactgtatgcagcctctgcagacccctctgttcacatttggccctggcaccaaggtggaaatcaaaggcggatcctctggagagatcgtgctgacacagagccctggcacactgtcactgtctccaggcgaaacagccacactgagctgtagagccagccagagcttcagcagcgacctggcttggtatcagcagaagcctggacaggcccctcggctgttgatctatggcgcctcttctagagccacaggcatccccgatagattcagcggctctggcagcggcaccgatttcaccctgacaatcagcagactggaacccgccgacttcgccgtgtactactgtcagcagtacggcagcagccctcctgtgacatttggcggcggaacaaaggtggaaatcaaaggaggtggtggctctggcggatctgggagtggtggcggaggctctgcttctggatctggagaagtgcagctggtggaatcaggcggcggactgattcaacctggcggctctctgagactgtcttgtgctgcttctggcgtgatcgtgtcctacaactacatgaactgggtccgacaggctcccggcaaaggccttgaatgggtgtccgtgatctacagcggcggcagcaccttttacgccgattctgtgcggggcagattcaccatcagccgggacaacagcaagaacaccctgtacctgcagatgaacagcctgagagccgaggacaccgctgtgtactattgcgccagagatctgggacctgccggcgcttttgatatctggggcctgggcacaatggtcaccgtgtctagcggaggcagctccgggcaagtgacactgagagagtctggccccgctctggtcaagcctacacagaccctgacactgacctgcaccttcagcggcttcagcctgtctactagaggcgtgtgcgtgtcctggatcagacagcctcctggaaaggccctggaatggctggccttcatcgactgggacgacgacaagtactacaacaccagcctgaaaacccggctgaccatcagcaaggacaccagcaagaaccaggtggtgctgaccatgaccaacgtgcaccctgtggataccgccacctactactgcgccagaatcagctctcaccacggctccagctggtgtaccaccttcgattattggggccagggcgctctcgtgacagtttctgctgcttctggcggctccggagataagacccacacatgtcctccatgtcctgctccagaactgctcggcggcccttctgtgttcctgtttcctccaaagcctaaggacaccctgatgatcagcagaacccctgaagtgacctgcgtggtggtggatgtgtctcacgaggaccccgaagtgaagttcaattggtacgtggacggcgtggaagtgcacaacgccaagaccaagcctagagaggaacagtacaacagcacctacagagtggtgtccgtgctgaccgtgctgcaccaggattggctgaacggcaaagagtacaagtgcaaggtgtccaacaaggccctgcctgctcctatcgagaaaaccatcagcaaggccaagggccagcctagggaaccccaggtttacacccttcctccaagccgggatgagctgaccaagaaccaggtgtccctgacatgtctcgtgaagggcttctaccccagcgacattgccgtggaatgggagagcaatggccagcctgagaacaactacaagacaacccctcctgtgctggacagcgacggctcattcttcctgtacagcaagctgacagtcgacaagtccagatggcagcagggcaacgtgttcagttgcagcgtgctgcacgaggccctgcacagtcactacacccagaagtccctgagcctgtctcctgga

SEQ ID NO: 319 - protein, 722 aa, synthetic construct
  REGION 1..722: note = MX1044
EIVLTQSPGTLSLSPGETATLSCRASQSFSSDLAWYQQKPGQAPRLLIYGASSRATGIPDRFSGSGSGTDFTLTISRLEPADFAVYYCQQYGSSPPVTFGGGTKVEIKGGSSGDTVMTQSPLSLPVTPGEPASISCRSSQSLLNSNGYNYLDWYVQKPGQSPQLLIYLGSNRASGVPDRFSGSGSGTDFTLKISRVEAEDVGVYYCMQPLQTPLFTFGPGTKVEIKGGGGSGGSGSGGGGSASGSGQVTLRESGPALVKPTQTLTLTCTFSGFSLSTRGVCVSWIRQPPGKALEWLAFIDWDDDKYYNTSLKTRLTISKDTSKNQVVLTMTNVHPVDTATYYCARISSHHGSSWCTTFDYWGQGALVTVSAGGSSGEVQLVESGGGLIQPGGSLRLSCAASGVIVSYNYMNWVRQAPGKGLEWVSVIYSGGSTFYADSVRGRFTISRDNSKNTLYLQMNSLRAEDTAVYYCARDLGPAGAFDIWGLGTMVTVSSASGGSGDKTHTCPPCPAPELLGGPSVFLFPPKPKDTLMISRTPEVTCVVVDVSHEDPEVKFNWYVDGVEVHNAKTKPREEQYNSYVVSVLTVLHQDWLNGKEYKCKVSNKALPAPIEKTISKAKGQPREPQVYTLPPSRDELTKNQVSLTCLVKGFYPSDIAVEWESNGQPENNYKTTPPVLDSDGSFFKKLTVDKSRWQQGNVFSCSVLHEALHSHYTQKSLSLSPG

SEQ ID NO: 320 - DNA, 2172 bp, synthetic construct
  misc_feature 1..2172: note = MX1044
  source 1..2172: mol_type = other DNA
gagatcgtgctgacacagagccctggcacactgtcactgtctccaggcgaaacagccacactgagctgtagagccagccagagcttcagcagcgacctggcttggtatcagcagaagcctggacaggcccctcggctgttgatctatggcgcctcttctagagccacaggcatccccgatagattcagcggctctggcagcggcaccgatttcaccctgacaatcagcagactggaacccgccgacttcgccgtgtactactgtcagcagtacggcagcagccctcctgtgacatttggcggcggaacaaaggtggaaatcaaaggcggatcctctggacagaccgtcgtgacccaagaaccatcctttagcgtgtccccaggcggaaccgtcactctgacttgtggactgtctagcggctccgtgtccacagcttacttcccgtcctggtatcaacaaacacccggccaggcacctagaactctgatctatgggaccaacactagaagctccggcgtgccagacaggttctctggcagcattctgggaaacaaagctgccctgaccattaccggcgctcaggctgatgatgagtctgactactattgcgtcctctatatgggacggggaatcgtggtgttcggaggcggcacaaaactgaccgttcttggaggtggtggctctggcggatctgggagtggtggcggaggctctgcttctggatctggacaggtccagctggttgaatctggtggcggagttgtgcagcctggcagaagcctgagactgtcttgtgccgcctctggctttaccctgagcagctatggcatgcactgggtccgacaggcccctggcaaaggacttgaatgggtcgccgtgatcagctacgacggcagcaacaagtactacgtggacagcgtgaagggcagattcaccatcagccgggacaacagcaagaacaccctgtacctgcagatgaacagcctgagagccgaggacacagccgtgtattattgcgccagaggctgggcctattgggagctgctgcctgactactactacggcatggatgtgtggggccagggaaccacagtgaccgtgtctagcggaggcagctccggggaagtgcagctggtggaatcaggcggcggactgattcaacctggcggctctctgagactgtcttgtgctgcttctggcgtgatcgtgtcctacaactacatgaactgggtccgacaggctcccggcaaaggccttgaatgggtgtccgtgatctacagcggcggcagcaccttttacgccgattctgtgcggggcagattcaccatcagccgggacaacagcaagaacaccctgtacctgcagatgaacagcctgagagccgaggacaccgctgtgtactattgcgccagagatctgggacctgccggcgcttttgatatctggggcctgggcacaatggtcaccgtgtctagcgcttctggcggctccggagataagacccacacatgtcctccatgtcctgctccagaactgctcggcggcccttctgtgttcctgtttcctccaaagcctaaggacaccctgatgatcagcagaacccctgaagtgacctgcgtggtggtggatgtgtctcacgaggaccccgaagtgaagttcaattggtacgtggacggcgtggaagtgcacaacgccaagaccaagcctagagaggaacagtacaacagcacctacagagtggtgtccgtgctgaccgtgctgcaccaggattggctgaacggcaaagagtacaagtgcaaggtgtccaacaaggccctgcctgctcctatcgagaaaaccatcagcaaggccaagggccagcctagggaaccccaggtttacacccttcctccaagccgggatgagctgaccaagaaccaggtgtccctgacatgtctcgtgaagggcttctaccccagcgacattgccgtggaatgggagagcaatggccagcctgagaacaactacaagacaacccctcctgtgctggacagcgacggctcattcttcctgtacagcaagctgacagtcgacaagtccagatggcagcagggcaacgtgttcagttgcagcgtgctgcacgaggccctgcacagtcactacacccagaagtccctgagcctgtctcctgga

SEQ ID NO: 321 - protein, 718 aa, synthetic construct
  REGION 1..718: note = MX1045
EIVLTQSPGTLSLSPGETATLSCRASQSFSSDLAWYQQKPGQAPRLLIYGASSRATGIPDRFSGSGSGTDFTLTISRLEPADFAVYYCQQYGSSPPVTFGGGTKVEIKGGSSGQTVVTQEPSFSVSPGGTVTLTCGLSSGSVSTAYFPSWYQQTPGQAPRTLIYGTNTRSSGVPDRFSGSILGNKAALTITGAQADDESDYYCVLYMGRGIVVFGGGTKLTVLGGGGSGGSGSGGGGSASGSGQVQLVESGGGVVQPGRSLRLSCAASGFTLSSYGMHWVRQAPGKGLEWVAVISYDGSNKYYVDSVKGRFTISRDNSKNTLYLQMNSLRAEDTAVYYCRWAYWELLPDYYYGMDVWGQGTTVTVSSGGSSGEVQLVESGGGLIQPGGSLRLSCAASGVIVSYNYMNWVRQAPGKGLEWVSVIYSGGSTFYADSVRGRFTISRDNSKNTLYLQMNSLRAEDTAVYYCARDLGPAGAFDIWGLGTMVTVSSASGGSGDKTHTCPPCPAPELLGGPSVFLFPPKPKDTLMISRTPEVTCVVVDVSHEDPEVKFNWYVDGVEVHNAKTKPREEQYNSYVVSVLTVLHQDWLNGKEYKCKVSNKALPAPIEKTISKAKGQPREPQVYTLPPCRDELTKNQVSLWCLVKGFYPSDIAVEWESNGQPENNYKTTPPVLDSDGSFFKKLTVDKSRWQQGNVFSCSVLHEALHSHYTQKSLSLSPG

SEQ ID NO: 322 - DNA, 2178 bp, synthetic construct
  misc_feature 1..2178: note = MX1045
  source 1..2178: mol_type = other DNA
gagatcgtgctgacacagagccctggcacactgtcactgtctccaggcgaaacagccacactgagctgtagagccagccagagcttcagcagcgacctggcttggtatcagcagaagcctggacaggcccctcggctgttgatctatggcgcctcttctagagccacaggcatccccgatagattcagcggctctggcagcggcaccgatttcaccctgacaatcagcagactggaacccgccgacttcgccgtgtactactgtcagcagtacggcagcagccctcctgtgacatttggcggcggaacaaaggtggaaatcaaaggcggatcctctggagacaccgtgatgacacagagccctctgagcctgcctgtgacacctggcgaacctgccagcatcagctgtagaagcagccagagcctgctgaacagcaacggctacaactacctggattggtacgtgcagaagcccggccagtctcctcagctgctgatctacctgggcagcaatagagccagcggcgtgcccgatagattttctggctctggcagcggcaccgacttcaccctgaagatctctagagtggaagccgaggacgtgggcgtgtactactgtatgcagcctctgcagacccctctgttcacatttggccctggcaccaaggtggaaatcaaaggaggtggtggctctggcggatctgggagtggtggcggaggctctgcttctggatctggacaagtgacactgagagagtctggccccgctctggtcaagcctacacagaccctgacactgacctgcaccttcagcggcttcagcctgtctactagaggcgtgtgcgtgtcctggatcagacagcctcctggaaaggccctggaatggctggccttcatcgactgggacgacgacaagtactacaacaccagcctgaaaacccggctgaccatcagcaaggacaccagcaagaaccaggtggtgctgaccatgaccaacgtgcaccctgtggataccgccacctactactgcgccagaatcagctctcaccacggctccagctggtgtaccaccttcgattattggggccagggcgctctcgtgacagtttctgctggaggcagctccggggaagtgcagctggtggaatcaggcggcggactgattcaacctggcggctctctgagactgtcttgtgctgcttctggcgtgatcgtgtcctacaactacatgaactgggtccgacaggctcccggcaaaggccttgaatgggtgtccgtgatctacagcggcggcagcaccttttacgccgattctgtgcggggcagattcaccatcagccgggacaacagcaagaacaccctgtacctgcagatgaacagcctgagagccgaggacaccgctgtgtactattgcgccagagatctgggacctgccggcgcttttgatatctggggcctgggcacaatggtcaccgtgtctagcgcttctggcggctccggagataagacccacacatgtcctccatgtcctgctccagaactgctcggcggcccttctgtgttcctgtttcctccaaagcctaaggacaccctgatgatcagcagaacccctgaagtgacctgcgtggtggtggatgtgtctcacgaggaccccgaagtgaagttcaattggtacgtggacggcgtggaagtgcacaacgccaagaccaagcctagagaggaacagtacaacagcacctacagagtggtgtccgtgctgaccgtgctgcaccaggattggctgaacggcaaagagtacaagtgcaaggtgtccaacaaggccctgcctgctcctatcgagaaaaccatcagcaaggccaagggccagcctagggaaccccaggtttacacccttcctccaagccgggatgagctgaccaagaaccaggtgtccctgacatgtctcgtgaagggcttctaccccagcgacattgccgtggaatgggagagcaatggccagcctgagaacaactacaagacaacccctcctgtgctggacagcgacggctcattcttcctgtacagcaagctgacagtcgacaagtccagatggcagcagggcaacgtgttcagttgcagcgtgctgcacgaggccctgcacagtcactacacccagaagtccctgagcctgtctcctgga

SEQ ID NO: 323 - protein, 720 aa, synthetic construct
  REGION 1..720: note = MX1045
QTVVTQEPSFSVSPGGTVTLTCGLSSGSVSTAYFPSWYQQTPGQAPRTLIYGTNTRSSGVPDRFSGSILGNKAALTITGAQADDESDYYCVLYMGRGIVVFGGGTKLTVLGGSSGEIVLTQSPGTLSLSPGETATLSCRASQSFSSDLAWYQQKPGQAPRLLIYGASSRATGIPDRFSGSGSGTDFTLTISRLEPADFAVYYCQQYGSSPPVTFGGGTKVEIKGGGGSGGSGSGGGGSASGSGEVQLVESGGGLIQPGGSLRLSCAASGVIVSYNYMNWVRQAPGKGLEWVSVIYSGGSTFYADSVRGRFTISRDNSKNTLYLQMNSLRAEDTAVYYCARDLGPAGAFDIWGLGTMVTVSSGGSSGQVQLVESGGGVVQPGRSLRLSCAASGFTLSSYGMHWVRQAPGKGLEWVAVISYDGSNKYYVDSVKGRFTISRDNSKNTLYLQMNSLRAEDTAVYYCRWAYWELLPDYYYGMDVWGQGTTVTVSSASGGSGDKTHTCPPCPAPELLGGPSVFLFPPKPKDTLMISRTPEVTCVVVDVSHEDPEVKFNWYVDGVEVHNAKTKPREEQYNSYVVSVLTVLHQDWLNGKEYKCKVSNKALPAPIEKTISKAKGQPREPQVCTLPPSRDELTKNQVSLSCAVKGFYPSDIAVEWESNGQPENNYKTTPPVLDSDGSFFLVSKLTVDKSRWQQGNVFSCSVLHEALHSHYTQKSLSLSPG

SEQ ID NO: 324 - DNA, 2172 bp, synthetic construct
  misc_feature 1..2172: note = MX1045
  source 1..2172: mol_type = other DNA
cagaccgtggtcacacaagagcctagctttagcgtgtcccctggcggcacagtgacactgacatgtggactttctagcggatctgtgtccaccgcctactttcccagctggtatcaacagaccccaggccaggcacctcggacactgatctacggcaccaacacaagatccagcggcgtgcccgataggttcagcggatctatcctgggcaacaaggccgcactgactatcacaggcgcccaggccgatgacgagagcgattactactgcgtgctgtacatgggcagaggcatcgtggtttttggcggaggcaccaagctgacagtgcttggcggatcctctggagagatcgtgctgacacagagccctggcacactgtcactgtctccaggcgaaacagccacactgagctgtagagccagccagagcttcagcagcgacctggcttggtatcagcagaagcctggacaggcccctcggctgttgatctatggcgcctcttctagagccacaggcatccccgatagattcagcggctctggcagcggcaccgatttcaccctgacaatcagcagactggaacccgccgacttcgccgtgtactactgtcagcagtacggcagcagccctcctgtgacatttggcggcggaacaaaggtggaaatcaaaggaggtggtggctctggcggatctgggagtggtggcggaggctctgcttctggatctggagaagtgcagctggtggaatcaggcggcggactgattcaacctggcggctctctgagactgtcttgtgctgcttctggcgtgatcgtgtcctacaactacatgaactgggtccgacaggctcccggcaaaggccttgaatgggtgtccgtgatctacagcggcggcagcaccttttacgccgattctgtgcggggcagattcaccatcagccgggacaacagcaagaacaccctgtacctgcagatgaacagcctgagagccgaggacaccgctgtgtactattgcgccagagatctgggacctgccggcgcttttgatatctggggcctgggcacaatggtcaccgtgtctagcggaggcagctccgggcaggtccagcttgttgaaagtggcggaggggttgtgcaacccggaagatctctgagactgtcttgcgccgccagcggctttacactgtcctcttatggaatgcattgggttcgacaagctcccggcaagggactcgaatgggttgcagtgatttcctacgatggctccaacaagtattatgtcgactccgtgaaaggccggttcacaatctccagagacaactccaagaatacgctctatctccagatgaacagcctgcgggccgaagatacagccgtgtattactgcgctcgcggatgggcttactgggaactgctccctgattactattacggaatggacgtctggggacagggaacaaccgtgaccgttagctctgcttctggcggctccggagataagacccacacatgtcctccatgtcctgctccagaactgctcggcggcccttctgtgttcctgtttcctccaaagcctaaggacaccctgatgatcagcagaacccctgaagtgacctgcgtggtggtggatgtgtctcacgaggaccccgaagtgaagttcaattggtacgtggacggcgtggaagtgcacaacgccaagaccaagcctagagaggaacagtacaacagcacctacagagtggtgtccgtgctgaccgtgctgcaccaggattggctgaacggcaaagagtacaagtgcaaggtgtccaacaaggccctgcctgctcctatcgagaaaaccatcagcaaggccaagggccagcctagggaaccccaggtttgtacccttcctccaagccgggatgagctgaccaagaaccaggtgtccctgagctgtgccgtgaagggcttctaccccagcgacattgccgtggaatgggagagcaatggccagcctgagaacaactacaagacaacccctcctgtgctggacagcgacggctcattcttcctggtgagcaagctgacagtcgacaagtccagatggcagcagggcaacgtgttcagttgcagcgtgctgcacgaggccctgcacagtcactacacccagaagtccctgagcctgtctcctgga

SEQ ID NO: 325 - protein, 722 aa, synthetic construct
  REGION 1..722: note = MX1046
EIVLTQSPGTLSLSPGETATLSCRASQSFSSDLAWYQQKPGQAPRLLIYGASSRATGIPDRFSGSGSGTDFTLTISRLEPADFAVYYCQQYGSSPPVTFGGGTKVEIKGGSSGDTVMTQSPLSLPVTPGEPASISCRSSQSLLNSNGYNYLDWYVQKPGQSPQLLIYLGSNRASGVPDRFSGSGSGTDFTLKISRVEAEDVGVYYCMQPLQTPLFTFGPGTKVEIKGGGGSGGSGSGGGGSASGSGQVTLRESGPALVKPTQTLTLTCTFSGFSLSTRGVCVSWIRQPPGKALEWLAFIDWDDDKYYNTSLKTRLTISKDTSKNQVVLTMTNVHPVDTATYYCARISSHHGSSWCTTFDYWGQGALVTVSAGGSSGEVQLVESGGGLIQPGGSLRLSCAASGVIVSYNYMNWVRQAPGKGLEWVSVIYSGGSTFYADSVRGRFTISRDNSKNTLYLQMNSLRAEDTAVYYCARDLGPAGAFDIWGLGTMVTVSSASGGSGDKTHTCPPCPAPELLGGPSVFLFPPKPKDTLMISRTPEVTCVVVDVSHEDPEVKFNWYVDGVEVHNAKTKPREEQYNSYVVSVLTVLHQDWLNGKEYKCKVSNKALPAPIEKTISKAKGQPREPQVYTLPPCRDELTKNQVSLWCLVKGFYPSDIAVEWESNGQPENNYKTTPPVLDSDGSFFKKLTVDKSRWQQGNVFSCSVLHEALHSHYTQKSLSLSPG

SEQ ID NO: 326 - DNA, 2178 bp, synthetic construct
  misc_feature 1..2178: note = MX1046
  source 1..2178: mol_type = other DNA
gagatcgtgctgacacagagccctggcacactgtcactgtctccaggcgaaacagccacactgagctgtagagccagccagagcttcagcagcgacctggcttggtatcagcagaagcctggacaggcccctcggctgttgatctatggcgcctcttctagagccacaggcatccccgatagattcagcggctctggcagcggcaccgatttcaccctgacaatcagcagactggaacccgccgacttcgccgtgtactactgtcagcagtacggcagcagccctcctgtgacatttggcggcggaacaaaggtggaaatcaaaggcggatcctctggagacaccgtgatgacacagagccctctgagcctgcctgtgacacctggcgaacctgccagcatcagctgtagaagcagccagagcctgctgaacagcaacggctacaactacctggattggtacgtgcagaagcccggccagtctcctcagctgctgatctacctgggcagcaatagagccagcggcgtgcccgatagattttctggctctggcagcggcaccgacttcaccctgaagatctctagagtggaagccgaggacgtgggcgtgtactactgtatgcagcctctgcagacccctctgttcacatttggccctggcaccaaggtggaaatcaaaggaggtggtggctctggcggatctgggagtggtggcggaggctctgcttctggatctggacaagtgacactgagagagtctggccccgctctggtcaagcctacacagaccctgacactgacctgcaccttcagcggcttcagcctgtctactagaggcgtgtgcgtgtcctggatcagacagcctcctggaaaggccctggaatggctggccttcatcgactgggacgacgacaagtactacaacaccagcctgaaaacccggctgaccatcagcaaggacaccagcaagaaccaggtggtgctgaccatgaccaacgtgcaccctgtggataccgccacctactactgcgccagaatcagctctcaccacggctccagctggtgtaccaccttcgattattggggccagggcgctctcgtgacagtttctgctggaggcagctccggggaagtgcagctggtggaatcaggcggcggactgattcaacctggcggctctctgagactgtcttgtgctgcttctggcgtgatcgtgtcctacaactacatgaactgggtccgacaggctcccggcaaaggccttgaatgggtgtccgtgatctacagcggcggcagcaccttttacgccgattctgtgcggggcagattcaccatcagccgggacaacagcaagaacaccctgtacctgcagatgaacagcctgagagccgaggacaccgctgtgtactattgcgccagagatctgggacctgccggcgcttttgatatctggggcctgggcacaatggtcaccgtgtctagcgcttctggcggctccggagataagacccacacatgtcctccatgtcctgctccagaactgctcggcggcccttctgtgttcctgtttcctccaaagcctaaggacaccctgatgatcagcagaacccctgaagtgacctgcgtggtggtggatgtgtctcacgaggaccccgaagtgaagttcaattggtacgtggacggcgtggaagtgcacaacgccaagaccaagcctagagaggaacagtacaacagcacctacagagtggtgtccgtgctgaccgtgctgcaccaggattggctgaacggcaaagagtacaagtgcaaggtgtccaacaaggccctgcctgctcctatcgagaaaaccatcagcaaggccaagggccagcctagggaaccccaggtttacacccttcctccatgccgggatgagctgaccaagaaccaggtgtccctgtggtgtctcgtgaagggcttctaccccagcgacattgccgtggaatgggagagcaatggccagcctgagaacaactacaagacaacccctcctgtgctggacagcgacggctcattcttcctgtacagcaagctgacagtcgacaagtccagatggcagcagggcaacgtgttcagttgcagcgtgctgcacgaggccctgcacagtcactacacccagaagtccctgagcctgtctcctgga

SEQ ID NO: 327 - protein, 724 aa, synthetic construct
  REGION 1..724: note = MX1046
DTVMTQSPLSLPVTPGEPASISCRSSQSLLNSNGYNYLDWYVQKPGQSPQLLIYLGSNRASGVPDRFSGSGSGTDFTLKISRVEAEDVGVYYCMQPLQTPLFTFGPGTKVEIKGGSSGEIVLTQSPGTLSLSPGETATLSCRASQSFSSDLAWYQQKPGQAPRLLIYGASSRATGIPDRFSGSGSGTDFTLTISRLEPADFAVYYCQQYGSSPPVTFGGGTKVEIKGGGGSGGSGSGGGGSASGSGEVQLVESGGGLIQPGGSLRLSCAASGVIVSYNYMNWVRQAPGKGLEWVSVIYSGGSTFYADSVRGRFTISRDNSKNTLYLQMNSLRAEDTAVYYCARDLGPAGAFDIWGLGTMVTVSSGGSSGQVTLRESGPALVKPTQTLTLTCTFSGFSLSTRGVCVSWIRQPPGKALEWLAFIDWDDDKYYNTSLKTRLTISKDTSKNQVVLTMTNVHPVDTATYYCARISSHHGSSWCTTFDYWGQGALVTVSAASGGSGDKTHTCPPCPAPELLGGPSVFLFPPKPKDTLMISRTPEVTCVVVDVSHEDPEVKFNWYVDGVEVHNAKTKPREEQYNSYVVSVLTVLHQDWLNGKEYKCKVSNKALPAPIEKTISKAKGQPREPQVCTLPPSRDELTKNQVSLSCAVKGFYPSDIAVEWESNGQPENNYKTTPPVLDSDGSFFLVSKLTVDKSRWQQGNVFSCSVLHEALHSHYTQKSLSLSPG

SEQ ID NO: 328 - DNA, 2178 bp, synthetic construct
  misc_feature 1..2178: note = MX1046
  source 1..2178: mol_type = other DNA
gacaccgtgatgacacagagccctctgagcctgcctgtgacacctggcgaacctgccagcatcagctgtagaagcagccagagcctgctgaacagcaacggctacaactacctggattggtacgtgcagaagcccggccagtctcctcagctgctgatctacctgggcagcaatagagccagcggcgtgcccgatagattttctggctctggcagcggcaccgacttcaccctgaagatctctagagtggaagccgaggacgtgggcgtgtactactgtatgcagcctctgcagacccctctgttcacatttggccctggcaccaaggtggaaatcaaaggcggatcctctggagagatcgtgctgacacagagccctggcacactgtcactgtctccaggcgaaacagccacactgagctgtagagccagccagagcttcagcagcgacctggcttggtatcagcagaagcctggacaggcccctcggctgttgatctatggcgcctcttctagagccacaggcatccccgatagattcagcggctctggcagcggcaccgatttcaccctgacaatcagcagactggaacccgccgacttcgccgtgtactactgtcagcagtacggcagcagccctcctgtgacatttggcggcggaacaaaggtggaaatcaaaggaggtggtggctctggcggatctgggagtggtggcggaggctctgcttctggatctggagaagtgcagctggtggaatcaggcggcggactgattcaacctggcggctctctgagactgtcttgtgctgcttctggcgtgatcgtgtcctacaactacatgaactgggtccgacaggctcccggcaaaggccttgaatgggtgtccgtgatctacagcggcggcagcaccttttacgccgattctgtgcggggcagattcaccatcagccgggacaacagcaagaacaccctgtacctgcagatgaacagcctgagagccgaggacaccgctgtgtactattgcgccagagatctgggacctgccggcgcttttgatatctggggcctgggcacaatggtcaccgtgtctagcggaggcagctccgggcaagtgacactgagagagtctggccccgctctggtcaagcctacacagaccctgacactgacctgcaccttcagcggcttcagcctgtctactagaggcgtgtgcgtgtcctggatcagacagcctcctggaaaggccctggaatggctggccttcatcgactgggacgacgacaagtactacaacaccagcctgaaaacccggctgaccatcagcaaggacaccagcaagaaccaggtggtgctgaccatgaccaacgtgcaccctgtggataccgccacctactactgcgccagaatcagctctcaccacggctccagctggtgtaccaccttcgattattggggccagggcgctctcgtgacagtttctgctgcttctggcggctccggagataagacccacacatgtcctccatgtcctgctccagaactgctcggcggcccttctgtgttcctgtttcctccaaagcctaaggacaccctgatgatcagcagaacccctgaagtgacctgcgtggtggtggatgtgtctcacgaggaccccgaagtgaagttcaattggtacgtggacggcgtggaagtgcacaacgccaagaccaagcctagagaggaacagtacaacagcacctacagagtggtgtccgtgctgaccgtgctgcaccaggattggctgaacggcaaagagtacaagtgcaaggtgtccaacaaggccctgcctgctcctatcgagaaaaccatcagcaaggccaagggccagcctagggaaccccaggtttgtacccttcctccaagccgggatgagctgaccaagaaccaggtgtccctgagctgtgccgtgaagggcttctaccccagcgacattgccgtggaatgggagagcaatggccagcctgagaacaactacaagacaacccctcctgtgctggacagcgacggctcattcttcctggtgagcaagctgacagtcgacaagtccagatggcagcagggcaacgtgttcagttgcagcgtgctgcacgaggccctgcacagtcactacacccagaagtccctgagcctgtctcctgga

SEQ ID NO: 329 - protein, 474 aa, synthetic construct
  REGION 1..474: note = MX1019
EIVMTQSPAILSVSPGERATLSCRASQSVAINLAWYQQKPGQAPRLLIYAASSRATGIPGRFSGSGSETNFTLTISSLQSGDFAVYYCQQYITWPPSYTFGQGTKLEIKGGGGSGGSGSGGGGSASGSGEVQLVESGGALIQPGGSLRLSCAASGIIVSANYMSWVRQAPGKGLEWVSVIYSGGSTFYADSVKGRFTISRDNSKNTLYLEMNSLRAEDTAVYYCARDAPILGVSDWGQGTLVTVSSASGGSGDKTHTCPPCPAPELLGGPSVFLFPPKPKDTLMISRTPEVTCVVVDVSHEDPEVKFNWYVDGVEVHNAKTKPREEQYNSYVVSVLTVLHQDWLNGKEYKCKVSNKALPAPIEKTISKAKGQPREPQVYTLPPSRDELTKNQVSLTCLVKGFYPSDIAVEWESNGQPENNYKTTPPVLDSDGSFFKKLTVDKSRWQQGNVFSCSVLHEALHSHYTQKSLSLSPG

SEQ ID NO: 330 - DNA, 1434 bp, synthetic construct
  misc_feature 1..1434: note = MX1019
  source 1..1434: mol_type = other DNA
gagatcgtgatgacacagagccccgccatcctgagtgtgtctccaggcgaaagagccacactgagctgtagagcctctcagagcgtggccatcaacctggcctggtatcagcagaagcctggacaggctccccggctgctgatctatgccgcttcttctagagccacaggcatccctggcagattttctggcagcggcagcgagacaaacttcaccctgaccatcagctccctgcagagcggcgatttcgccgtgtactactgccagcagtacatcacctggccacctagctacacctttggccagggcaccaagctggaaatcaaaggaggtggtggctctggcggatctgggagtggtggcggaggctctgcttctggatctggagaagtgcagctggtggaaagtggcggagcactgattcagcctggcggctctctgagactgtcttgtgccgcctctggcatcatcgtgtccgccaactacatgagctgggtccgacaggcccctggcaaaggacttgaatgggtgtccgtgatctacagcggcggcagcaccttttacgccgactctgtgaagggcagattcaccatcagccgggacaacagcaagaacaccctgtacctggaaatgaacagcctgagagccgaggacaccgctgtgtactattgcgccagagatgcccctatcctgggcgtgtcagattggggccagggaacactggtcacagtgtctagcgcttctggcggctccggagataagacccacacatgtcctccatgtcctgctccagaactgctcggcggcccttctgtgttcctgtttcctccaaagcctaaggacaccctgatgatcagcagaacccctgaagtgacctgcgtggtggtggatgtgtctcacgaggaccccgaagtgaagttcaattggtacgtggacggcgtggaagtgcacaacgccaagaccaagcctagagaggaacagtacaacagcacctacagagtggtgtccgtgctgaccgtgctgcaccaggattggctgaacggcaaagagtacaagtgcaaggtgtccaacaaggccctgcctgctcctatcgagaaaaccatcagcaaggccaagggccagcctagggaaccccaggtttacacccttcctccaagccgggatgagctgaccaagaaccaggtgtccctgacatgtctcgtgaagggcttctaccccagcgacattgccgtggaatgggagagcaatggccagcctgagaacaactacaagacaacccctcctgtgctggacagcgacggctcattcttcctgtacagcaagctgacagtcgacaagtccagatggcagcagggcaacgtgttcagttgcagcgtgctgcacgaggccctgcacagtcactacacccagaagtccctgagcctgtctcctgga

SEQ ID NO: 331 - protein, 474 aa, synthetic construct
  REGION 1..474: note = MX1025
EIVLTQSPGTLSLSPGETATLSCRASQSFSSDLAWYQQKPGQAPRLLIYGASSRATGIPDRFSGSGSGTDFTLTISRLEPADFAVYYCQQYGSSPPVTFGGGTKVEIKGGGGSGGSGSGGGGSASGSGEVQLVESGGGLIQPGGSLRLSCAASGVIVSYNYMNWVRQAPGKGLEWVSVIYSGGSTFYADSVRGRFTISRDNSKNTLYLQMNSLRAEDTAVYYCARDLGPAGAFDIWGLGTMVTVSSASGGSGDKTHTCPPCPAPELLGGPSVFLFPPKPKDTLMISRTPEVTCVVVDVSHEDPEVKFNWYVDGVEVHNAKTKPREEQYNSYVVSVLTVLHQDWLNGKEYKCKVSNKALPAPIEKTISKAKGQPREPQVYTLPPSRDELTKNQVSLTCLVKGFYPSDIAVEWESNGQPENNYKTTPPVLDSDGSFFKKLTVDKSRWQQGNVFSCSVLHEALHSHYTQKSLSLSPG

SEQ ID NO: 332 - DNA, 1434 bp, synthetic construct
  misc_feature 1..1434: note = MX1025
  source 1..1434: mol_type = other DNA
gagatcgtgctgacacagagccctggcacactgtcactgtctccaggcgaaacagccacactgagctgtagagccagccagagcttcagcagcgacctggcttggtatcagcagaagcctggacaggcccctcggctgttgatctatggcgcctcttctagagccacaggcatccccgatagattcagcggctctggcagcggcaccgatttcaccctgacaatcagcagactggaacccgccgacttcgccgtgtactactgtcagcagtacggcagcagccctcctgtgacatttggcggcggaacaaaggtggaaatcaaaggaggtggtggctctggcggatctgggagtggtggcggaggctctgcttctggatctggagaagtgcagctggtggaatcaggcggcggactgattcaacctggcggctctctgagactgtcttgtgctgcttctggcgtgatcgtgtcctacaactacatgaactgggtccgacaggctcccggcaaaggccttgaatgggtgtccgtgatctacagcggcggcagcaccttttacgccgattctgtgcggggcagattcaccatcagccgggacaacagcaagaacaccctgtacctgcagatgaacagcctgagagccgaggacaccgctgtgtactattgcgccagagatctgggacctgccggcgcttttgatatctggggcctgggcacaatggtcaccgtgtctagcgcttctggcggctccggagataagacccacacatgtcctccatgtcctgctccagaactgctcggcggcccttctgtgttcctgtttcctccaaagcctaaggacaccctgatgatcagcagaacccctgaagtgacctgcgtggtggtggatgtgtctcacgaggaccccgaagtgaagttcaattggtacgtggacggcgtggaagtgcacaacgccaagaccaagcctagagaggaacagtacaacagcacctacagagtggtgtccgtgctgaccgtgctgcaccaggattggctgaacggcaaagagtacaagtgcaaggtgtccaacaaggccctgcctgctcctatcgagaaaaccatcagcaaggccaagggccagcctagggaaccccaggtttacacccttcctccaagccgggatgagctgaccaagaaccaggtgtccctgacatgtctcgtgaagggcttctaccccagcgacattgccgtggaatgggagagcaatggccagcctgagaacaactacaagacaacccctcctgtgctggacagcgacggctcattcttcctgtacagcaagctgacagtcgacaagtccagatggcagcagggcaacgtgttcagttgcagcgtgctgcacgaggccctgcacagtcactacacccagaagtccctgagcctgtctcctgga

SEQ ID NO: 333 - protein, 486 aa, synthetic construct
  REGION 1..486: note = MX1026
DTVMTQSPLSLPVTPGEPASISCRSSQSLLNSNGYNYLDWYVQKPGQSPQLLIYLGSNRASGVPDRFSGSGSGTDFTLKISRVEAEDVGVYYCMQPLQTPLFTFGPGTKVEIKGGGGSGGSGSGGGGSASGSGQVTLRESGPALVKPTQTLTLTCTFSGFSLSTRGVCVSWIRQPPGKALEWLAFIDWDDDKYYNTSLKTRLTISKDTSKNQVVLTMTNVHPVDTATYYCARISSHHGSSWCTTFDYWGQGALVTVSAASGGSGDKTHTCPPCPAPELLGGPSVFLFPPKPKDTLMISRTPEVTCVVVDVSHEDPEVKFNWYVDGVEVHNAKTKPREEQYNSYVVSVLTVLHQDWLNGKEYKCKVSNKALPAPIEKTISKAKGQPREPQVYTLPPSRDELTKNQVSLTCLVKGFYPSDIAVEWESNGQPENNYKTTPPVLDSDGSFFKKLTVDKSRWQQGNVFSCSVLHEALHSHYTQKSLSLSPG

SEQ ID NO: 334 - DNA, 1470 bp, synthetic construct
  misc_feature 1..1470: note = MX1026
  source 1..1470: mol_type = other DNA
gacaccgtgatgacacagagccctctgagcctgcctgtgacacctggcgaacctgccagcatcagctgtagaagcagccagagcctgctgaacagcaacggctacaactacctggattggtacgtgcagaagcccggccagtctcctcagctgctgatctacctgggcagcaatagagccagcggcgtgcccgatagattttctggctctggcagcggcaccgacttcaccctgaagatctctagagtggaagccgaggacgtgggcgtgtactactgtatgcagcctctgcagacccctctgttcacatttggccctggcaccaaggtggaaatcaaaggaggtggtggctctggcggatctgggagtggtggcggaggctctgcttctggatctggacaagtgacactgagagagtctggccccgctctggtcaagcctacacagaccctgacactgacctgcaccttcagcggcttcagcctgtctactagaggcgtgtgcgtgtcctggatcagacagcctcctggaaaggccctggaatggctggccttcatcgactgggacgacgacaagtactacaacaccagcctgaaaacccggctgaccatcagcaaggacaccagcaagaaccaggtggtgctgaccatgaccaacgtgcaccctgtggataccgccacctactactgcgccagaatcagctctcaccacggctccagctggtgtaccaccttcgattattggggccagggcgctctcgtgacagtttctgctgcttctggcggctccggagataagacccacacatgtcctccatgtcctgctccagaactgctcggcggcccttctgtgttcctgtttcctccaaagcctaaggacaccctgatgatcagcagaacccctgaagtgacctgcgtggtggtggatgtgtctcacgaggaccccgaagtgaagttcaattggtacgtggacggcgtggaagtgcacaacgccaagaccaagcctagagaggaacagtacaacagcacctacagagtggtgtccgtgctgaccgtgctgcaccaggattggctgaacggcaaagagtacaagtgcaaggtgtccaacaaggccctgcctgctcctatcgagaaaaccatcagcaaggccaagggccagcctagggaaccccaggtttacacccttcctccaagccgggatgagctgaccaagaaccaggtgtccctgacatgtctcgtgaagggcttctaccccagcgacattgccgtggaatgggagagcaatggccagcctgagaacaactacaagacaacccctcctgtgctggacagcgacggctcattcttcctgtacagcaagctgacagtcgacaagtccagatggcagcagggcaacgtgttcagttgcagcgtgctgcacgaggccctgcacagtcactacacccagaagtccctgagcctgtctcctgga

SEQ ID NO: 335 - protein, 726 aa, synthetic construct
  REGION 1..726: note = MX1047
DTVMTQSPLSLPVTPGEPASISCRSSQSLLNSNGYNYLDWYVQKPGQSPQLLIYLGSNRASGVPDRFSGSGSGTDFTLKISRVEAEDVGVYYCMQPLQTPLFTFGPGTKVEIKGGSSGEIVLTQSPGTLSLSPGERATLSCRASQSVSSSYLAWYQQKPGQAPRLLIYSASSRATGIPDRFSGSGSGTDFTLTISRLEPEDFAVYFCQQYVGLTGWTFGQGTKVEIKGGGGSGGSGSGGGGSASGSGQMQLVQSGPEVKKPGTSVKVSCKASGFTFTSSAVQWVRQRQRLEWIGWIVVGSGNTNYAQKFQERVTITRDMSTSTAYMELSSLRSEDTAVYYCAAPNCSNVVCYDGFDIWGQGTMVTVSSGGSSGQVTLRESGPALVKPTQTLTLTCTFSGFSLSTRGVCVSWIRQPPGKALEWLAFIDWDDDKYYNTSLKTRLTISKDTSKNQVVLTMTNVHPVDTATYYCARISSHHGSSWCTTFDYWGQGALVTVSAASGGSGDKTHTCPPCPAPELLGGPSVFLFPPKPKDTLMISRTPEVTCVVVDVSHEDPEVKFNWYVDGVEVHNAKTKPREEQYNSYVVSVLTVLHQDWLNGKEYKCKVSNKALPAPIEKTISKAKGQPREPQVYTLPPSRDELTKNQVSLTCLVKGFYPSDIAVEWESNGQPENNYKTTPPVLDSDGSFFKKLTVDKSRWQQGNVFSCSVLHEALHSHYTQKSLSLSPG

SEQ ID NO: 336 - DNA, 2196 bp, synthetic construct
  misc_feature 1..2196: note = MX1047
  source 1..2196: mol_type = other DNA
gacaccgtgatgacacagagccctctgagcctgcctgtgacacctggcgaacctgccagcatcagctgtagaagcagccagagcctgctgaacagcaacggctacaactacctggattggtacgtgcagaagcccggccagtctcctcagctgctgatctacctgggcagcaatagagccagcggcgtgcccgatagattttctggctctggcagcggcaccgacttcaccctgaagatctctagagtggaagccgaggacgtgggcgtgtactactgtatgcagcctctgcagacccctctgttcacatttggccctggcaccaaggtggaaatcaaaggcggatcctctggagaaattgtgctgacccaatctccaggcactctgtctctgagccctggggagagagctaccctgtcttgtagagcctctcagtccgtgtcctccagctatctcgcctggtatcaacaaaagcctgggcaagcccctcggctgctcatctactctgctagctcaagagccaccggaattcccgacaggtttagcggaagcggctccggcacagacttcacactgaccatctctcggctggaacctgaagattttgccgtctatttttgtcagcagtatgtcgggctcacaggatggacctttggacagggcaccaaagtcgagatcaaaggaggtggtggctctggcggatctgggagtggtggcggaggctctgcttctggatctggacaaatgcagctcgttcagagcggccctgaagtgaagaaacctggcacctccgtgaaggtgtcctgcaaggccagcggcttcacctttacaagctctgccgtgcagtgggttcgacaagctagaggccagagactggaatggatcggctggatcgttgtcggcagcggcaacaccaattacgcccagaaattccaagagcgcgtgaccatcaccagagacatgagcaccagcacagcctacatggaactgagcagtctgcgcagcgaagataccgctgtgtactattgtgccgctcctaactgcagcaacgtcgtgtgctacgatggcttcgacatctggggacagggcacaatggtcaccgtgtcctctggaggcagctccgggcaagtgacactgagagagtctggccccgctctggtcaagcctacacagaccctgacactgacctgcaccttcagcggcttcagcctgtctactagaggcgtgtgcgtgtcctggatcagacagcctcctggaaaggccctggaatggctggccttcatcgactgggacgacgacaagtactacaacaccagcctgaaaacccggctgaccatcagcaaggacaccagcaagaaccaggtggtgctgaccatgaccaacgtgcaccctgtggataccgccacctactactgcgccagaatcagctctcaccacggctccagctggtgtaccaccttcgattattggggccagggcgctctcgtgacagtttctgctgcttctggcggctccggagataagacccacacatgtcctccatgtcctgctccagaactgctcggcggcccttctgtgttcctgtttcctccaaagcctaaggacaccctgatgatcagcagaacccctgaagtgacctgcgtggtggtggatgtgtctcacgaggaccccgaagtgaagttcaattggtacgtggacggcgtggaagtgcacaacgccaagaccaagcctagagaggaacagtacaacagcacctacagagtggtgtccgtgctgaccgtgctgcaccaggattggctgaacggcaaagagtacaagtgcaaggtgtccaacaaggccctgcctgctcctatcgagaaaaccatcagcaaggccaagggccagcctagggaaccccaggtttacacccttcctccaagccgggatgagctgaccaagaaccaggtgtccctgacatgtctcgtgaagggcttctaccccagcgacattgccgtggaatgggagagcaatggccagcctgagaacaactacaagacaacccctcctgtgctggacagcgacggctcattcttcctgtacagcaagctgacagtcgacaagtccagatggcagcagggcaacgtgttcagttgcagcgtgctgcacgaggccctgcacagtcactacacccagaagtccctgagcctgtctcctgga

SEQ ID NO: 337 - protein, 722 aa, synthetic construct; identical to SEQ ID NO: 206
  REGION 1..722: note = MX1047

SEQ ID NO: 338 - DNA, 2196 bp, synthetic construct; identical to SEQ ID NO: 336
  misc_feature 1..2196: note = MX1047
  source 1..2196: mol_type = other DNA

SEQ ID NO: 339 - protein, 726 aa, synthetic construct
  REGION 1..726: note = MX1049
EIVLTQSPGTLSLSPGERATLSCRASQSVSSSYLAWYQQKPGQAPRLLIYSASSRATGIPDRFSGSGSGTDFTLTISRLEPEDFAVYFCQQYVGLTGWTFGQGTKVEIKGGSSGDTVMTQSPLSLPVTPGEPASISCRSSQSLLNSNGYNYLDWYVQKPGQSPQLLIYLGSNRASGVPDRFSGSGSGTDFTLKISRVEAEDVGVYYCMQPLQTPLFTFGPGTKVEIKGGGGSGGSGSGGGGSASGSGQVTLRESGPALVKPTQTLTLTCTFSGFSLSTRGVCVSWIRQPPGKALEWLAFIDWDDDKYYNTSLKTRLTISKDTSKNQVVLTMTNVHPVDTATYYCARISSHHGSSWCTTFDYWGQGALVTVSAGGSSGQMQLVQSGPEVKKPGTSVKVSCKASGFTFTSSAVQWVRQRQRLEWIGWIVVGSGNTNYAQKFQERVTITRDMSTSTAYMELSSLRSEDTAVYYCAAPNCSNVVCYDGFDIWGQGTMVTVSSASGGSGDKTHTCPPCPAPELLGGPSVFLFPPKPKDTLMISRTPEVTCVVVDVSHEDPEVKFNWYVDGVEVHNAKTKPREEQYNSYVVSVLTVLHQDWLNGKEYKCKVSNKALPAPIEKTISKAKGQPREPQVYTLPPSRDELTKNQVSLTCLVKGFYPSDIAVEWESNGQPENNYKTTPPVLDSDGSFFKKLTVDKSRWQQGNVFSCSVLHEALHSHYTQKSLSLSPG

SEQ ID NO: 340 - DNA, 2196 bp, synthetic construct
  misc_feature 1..2196: note = MX1049
  source 1..2196: mol_type = other DNA
gagatcgtgctgacacagagccctggcacactgtcactgtctccaggcgaaagagccacactgagctgtagagccagccagagcgtgtccagctcttacctggcttggtatcagcagaagcccggacaggctcccagactgctgatctactctgccagcagcagagccacaggcatccccgatagattttctggcagcggctccggcaccgacttcaccctgacaatcagcagactggaacccgaggacttcgccgtgtacttctgtcagcagtacgtgggcctgaccggctggacatttggccagggaacaaaggtggaaatcaagggcggatcctctggagacaccgtgatgacacagagccctctgagcctgcctgtgacacctggcgaacctgccagcatcagctgtagaagcagccagagcctgctgaacagcaacggctacaactacctggattggtacgtgcagaagcccggccagtctcctcagctgctgatctacctgggcagcaatagagccagcggcgtgcccgatagattttctggctctggcagcggcaccgacttcaccctgaagatctctagagtggaagccgaggacgtgggcgtgtactactgtatgcagcctctgcagacccctctgttcacatttggccctggcaccaaggtggaaatcaaaggaggtggtggctctggcggatctgggagtggtggcggaggctctgcttctggatctggacaagtgacactgagagagtctggccccgctctggtcaagcctacacagaccctgacactgacctgcaccttcagcggcttcagcctgtctactagaggcgtgtgcgtgtcctggatcagacagcctcctggaaaggccctggaatggctggccttcatcgactgggacgacgacaagtactacaacaccagcctgaaaacccggctgaccatcagcaaggacaccagcaagaaccaggtggtgctgaccatgaccaacgtgcaccctgtggataccgccacctactactgcgccagaatcagctctcaccacggctccagctggtgtaccaccttcgattattggggccagggcgctctcgtgacagtttctgctggaggcagctccgggcagatgcaactcgttcagagcggacctgaagtgaaaaagcccggcacatccgtgaaagtctcttgcaaagcctccggctttaccttcaccagcagcgctgtccagtgggttcgccaagcaagaggccagagactcgagtggattggatggatcgtcgttggctcaggcaataccaattatgcccaaaagtttcaagagagggtcacgatcacccgggatatgagcacctctacagcatatatggaactgtcaagcctgcgctccgaggatacagccgtgtattactgtgctgccccaaactgctccaatgtcgtgtgttatgatggatttgacatttggggacagggaacgatggttacagtgtccagcgcttctggcggctccggagataagacccacacatgtcctccatgtcctgctccagaactgctcggcggcccttctgtgttcctgtttcctccaaagcctaaggacaccctgatgatcagcagaacccctgaagtgacctgcgtggtggtggatgtgtctcacgaggaccccgaagtgaagttcaattggtacgtggacggcgtggaagtgcacaacgccaagaccaagcctagagaggaacagtacaacagcacctacagagtggtgtccgtgctgaccgtgctgcaccaggattggctgaacggcaaagagtacaagtgcaaggtgtccaacaaggccctgcctgctcctatcgagaaaaccatcagcaaggccaagggccagcctagggaaccccaggtttacacccttcctccaagccgggatgagctgaccaagaaccaggtgtccctgacatgtctcgtgaagggcttctaccccagcgacattgccgtggaatgggagagcaatggccagcctgagaacaactacaagacaacccctcctgtgctggacagcgacggctcattcttcctgtacagcaagctgacagtcgacaagtccagatggcagcagggcaacgtgttcagttgcagcgtgctgcacgaggccctgcacagtcactacacccagaagtccctgagcctgtctcctgga

SEQ ID NO: 341 - protein, 726 aa, synthetic construct
  REGION 1..726: note = MX1051
EIVLTQSPGTLSLSPGERATLSCRASQSVSSSYLAWYQQKPGQAPRLLIYSASSRATGIPDRFSGSGSGTDFTLTISRLEPEDFAVYFCQQYVGLTGWTFGQGTKVEIKGGSSGDTVMTQSPLSLPVTPGEPASISCRSSQSLLNSNGYNYLDWYVQKPGQSPQLLIYLGSNRASGVPDRFSGSGSGTDFTLKISRVEAEDVGVYYCMQPLQTPLFTFGPGTKVEIKGGGGSGGSGSGGGGSASGSGQVTLRESGPALVKPTQTLTLTCTFSGFSLSTRGVCVSWIRQPPGKALEWLAFIDWDDDKYYNTSLKTRLTISKDTSKNQVVLTMTNVHPVDTATYYCARISSHHGSSWCTTFDYWGQGALVTVSAGGSSGQMQLVQSGPEVKKPGTSVKVSCKASGFTFTSSAVQWVRQRQRLEWIGWIVVGSGNTNYAQKFQERVTITRDMSTSTAYMELSSLRSEDTAVYYCAAPNCSNVVCYDGFDIWGQGTMVTVSSASGGSGDKTHTCPPCPAPELLGGPSVFLFPPKPKDTLMISRTPEVTCVVVDVSHEDPEVKFNWYVDGVEVHNAKTKPREEQYNSYVVSVLTVLHQDWLNGKEYKCKVSNKALPAPIEKTISKAKGQPREPQVYTLPPCRDELTKNQVSLWCLVKGFYPSDIAVEWESNGQPENNYKTTPPVLDSDGSFFKKLTVDKSRWQQGNVFSCSVLHEALHSHYTQKSLSLSPG

SEQ ID NO: 342 - DNA, 2196 bp, synthetic construct
  misc_feature 1..2196: note = MX1051
  source 1..2196: mol_type = other DNA
gagatcgtgctgacacagagccctggcacactgtcactgtctccaggcgaaagagccacactgagctgtagagccagccagagcgtgtccagctcttacctggcttggtatcagcagaagcccggacaggctcccagactgctgatctactctgccagcagcagagccacaggcatccccgatagattttctggcagcggctccggcaccgacttcaccctgacaatcagcagactggaacccgaggacttcgccgtgtacttctgtcagcagtacgtgggcctgaccggctggacatttggccagggaacaaaggtggaaatcaagggcggatcctctggagacaccgtgatgacacagagccctctgagcctgcctgtgacacctggcgaacctgccagcatcagctgtagaagcagccagagcctgctgaacagcaacggctacaactacctggattggtacgtgcagaagcccggccagtctcctcagctgctgatctacctgggcagcaatagagccagcggcgtgcccgatagattttctggctctggcagcggcaccgacttcaccctgaagatctctagagtggaagccgaggacgtgggcgtgtactactgtatgcagcctctgcagacccctctgttcacatttggccctggcaccaaggtggaaatcaaaggaggtggtggctctggcggatctgggagtggtggcggaggctctgcttctggatctggacaagtgacactgagagagtctggccccgctctggtcaagcctacacagaccctgacactgacctgcaccttcagcggcttcagcctgtctactagaggcgtgtgcgtgtcctggatcagacagcctcctggaaaggccctggaatggctggccttcatcgactgggacgacgacaagtactacaacaccagcctgaaaacccggctgaccatcagcaaggacaccagcaagaaccaggtggtgctgaccatgaccaacgtgcaccctgtggataccgccacctactactgcgccagaatcagctctcaccacggctccagctggtgtaccaccttcgattattggggccagggcgctctcgtgacagtttctgctggaggcagctccgggcagatgcaactcgttcagagcggacctgaagtgaaaaagcccggcacatccgtgaaagtctcttgcaaagcctccggctttaccttcaccagcagcgctgtccagtgggttcgccaagcaagaggccagagactcgagtggattggatggatcgtcgttggctcaggcaataccaattatgcccaaaagtttcaagagagggtcacgatcacccgggatatgagcacctctacagcatatatggaactgtcaagcctgcgctccgaggatacagccgtgtattactgtgctgccccaaactgctccaatgtcgtgtgttatgatggatttgacatttggggacagggaacgatggttacagtgtccagcgcttctggcggctccggagataagacccacacatgtcctccatgtcctgctccagaactgctcggcggcccttctgtgttcctgtttcctccaaagcctaaggacaccctgatgatcagcagaacccctgaagtgacctgcgtggtggtggatgtgtctcacgaggaccccgaagtgaagttcaattggtacgtggacggcgtggaagtgcacaacgccaagaccaagcctagagaggaacagtacaacagcacctacagagtggtgtccgtgctgaccgtgctgcaccaggattggctgaacggcaaagagtacaagtgcaaggtgtccaacaaggccctgcctgctcctatcgagaaaaccatcagcaaggccaagggccagcctagggaaccccaggtttacacccttcctccatgccgggatgagctgaccaagaaccaggtgtccctgtggtgtctcgtgaagggcttctaccccagcgacattgccgtggaatgggagagcaatggccagcctgagaacaactacaagacaacccctcctgtgctggacagcgacggctcattcttcctgtacagcaagctgacagtcgacaagtccagatggcagcagggcaacgtgttcagttgcagcgtgctgcacgaggccctgcacagtcactacacccagaagtccctgagcctgtctcctgga

SEQ ID NO: 343 - protein, 728 aa, synthetic construct
  REGION 1..728: note = MX1051
DTVMTQSPLSLPVTPGEPASISCRSSQSLLNSNGYNYLDWYVQKPGQSPQLLIYLGSNRASGVPDRFSGSGSGTDFTLKISRVEAEDVGVYYCMQPLQTPLFTFGPGTKVEIKGGSSGEIVLTQSPGTLSLSPGERATLSCRASQSVSSSYLAWYQQKPGQAPRLLIYSASSRATGIPDRFSGSGSGTDFTLTISRLEPEDFAVYFCQQYVGLTGWTFGQGTKVEIKGGGGSGGSGSGGGGSASGSGQMQLVQSGPEVKKPGTSVKVSCKASGFTFTSSAVQWVRQRQRLEWIGWIVVGSGNTNYAQKFQERVTITRDMSTSTAYMELSSLRSEDTAVYYCAAPNCSNVVCYDGFDIWGQGTMVTVSSGGSSGQVTLRESGPALVKPTQTLTLTCTFSGFSLSTRGVCVSWIRQPPGKALEWLAFIDWDDDKYYNTSLKTRLTISKDTSKNQVVLTMTNVHPVDTATYYCARISSHHGSSWCTTFDYWGQGALVTVSAASGGSGDKTHTCPPCPAPELLGGPSVFLFPPKPKDTLMISRTPEVTCVVVDVSHEDPEVKFNWYVDGVEVHNAKTKPREEQYNSYVVSVLTVLHQDWLNGKEYKCKVSNKALPAPIEKTISKAKGQPREPQVCTLPPSRDELTKNQVSLSCAVKGFYPSDIAVEWESNGQPENNYKTTPPVLDSDGSFFLVSKLTVDKSRWQQGNVFSCSVLHEALHSHYTQKSLSLSPG

SEQ ID NO: 344 - DNA, 2196 bp, synthetic construct
  misc_feature 1..2196: note = MX1051
  source 1..2196: mol_type = other DNA
gacaccgtgatgacacagagccctctgagcctgcctgtgacacctggcgaacctgccagcatcagctgtagaagcagccagagcctgctgaacagcaacggctacaactacctggattggtacgtgcagaagcccggccagtctcctcagctgctgatctacctgggcagcaatagagccagcggcgtgcccgatagattttctggctctggcagcggcaccgacttcaccctgaagatctctagagtggaagccgaggacgtgggcgtgtactactgtatgcagcctctgcagacccctctgttcacatttggccctggcaccaaggtggaaatcaaaggcggatcctctggagaaattgtgctgacccaatctccaggcactctgtctctgagccctggggagagagctaccctgtcttgtagagcctctcagtccgtgtcctccagctatctcgcctggtatcaacaaaagcctgggcaagcccctcggctgctcatctactctgctagctcaagagccaccggaattcccgacaggtttagcggaagcggctccggcacagacttcacactgaccatctctcggctggaacctgaagattttgccgtctatttttgtcagcagtatgtcgggctcacaggatggacctttggacagggcaccaaagtcgagatcaaaggaggtggtggctctggcggatctgggagtggtggcggaggctctgcttctggatctggacaaatgcagctcgttcagagcggccctgaagtgaagaaacctggcacctccgtgaaggtgtcctgcaaggccagcggcttcacctttacaagctctgccgtgcagtgggttcgacaagctagaggccagagactggaatggatcggctggatcgttgtcggcagcggcaacaccaattacgcccagaaattccaagagcgcgtgaccatcaccagagacatgagcaccagcacagcctacatggaactgagcagtctgcgcagcgaagataccgctgtgtactattgtgccgctcctaactgcagcaacgtcgtgtgctacgatggcttcgacatctggggacagggcacaatggtcaccgtgtcctctggaggcagctccgggcaagtgacactgagagagtctggccccgctctggtcaagcctacacagaccctgacactgacctgcaccttcagcggcttcagcctgtctactagaggcgtgtgcgtgtcctggatcagacagcctcctggaaaggccctggaatggctggccttcatcgactgggacgacgacaagtactacaacaccagcctgaaaacccggctgaccatcagcaaggacaccagcaagaaccaggtggtgctgaccatgaccaacgtgcaccctgtggataccgccacctactactgcgccagaatcagctctcaccacggctccagctggtgtaccaccttcgattattggggccagggcgctctcgtgacagtttctgctgcttctggcggctccggagataagacccacacatgtcctccatgtcctgctccagaactgctcggcggcccttctgtgttcctgtttcctccaaagcctaaggacaccctgatgatcagcagaacccctgaagtgacctgcgtggtggtggatgtgtctcacgaggaccccgaagtgaagttcaattggtacgtggacggcgtggaagtgcacaacgccaagaccaagcctagagaggaacagtacaacagcacctacagagtggtgtccgtgctgaccgtgctgcaccaggattggctgaacggcaaagagtacaagtgcaaggtgtccaacaaggccctgcctgctcctatcgagaaaaccatcagcaaggccaagggccagcctagggaaccccaggtttgtacccttcctccaagccgggatgagctgaccaagaaccaggtgtccctgagctgtgccgtgaagggcttctaccccagcgacattgccgtggaatgggagagcaatggccagcctgagaacaactacaagacaacccctcctgtgctggacagcgacggctcattcttcctggtgagcaagctgacagtcgacaagtccagatggcagcagggcaacgtgttcagttgcagcgtgctgcacgaggccctgcacagtcactacacccagaagtccctgagcctgtctcctgga

SEQ ID NO: 345 - protein, 718 aa, synthetic construct
  REGION 1..718: note = MX1054
QTVVTQEPSFSVSPGGTVTLTCGLSSGSVSTAYFPSWYQQTPGQAPRTLIYGTNTRSSGVPDRFSGSILGNKAALTITGAQADDESDYYCVLYMGRGIVVFGGGTKLTVLGGSSGEIVMTQSPAILSVSPGERATLSCRASQSVAINLAWYQQKPGQAPRLLIYAASSRATGIPGRFSGSGSETNFTLTISSLQSGDFAVYYCQQYITWPPSYTFGQGTKLEIKGGGGSGGSGSGGGGSASGSGEVQLVESGGALIQPGGSLRLSCAASGIIVSANYMSWVRQAPGKGLEWVSVIYSGGSTFYADSVKGRFTISRDNSKNTLYLEMNSLRAEDTAVYYCARDAPILGVSDWGQGTLVTVSSGGSSGQVQLVESGGGVVQPGRSLRLSCAASGFTLSSYGMHWVRQAPGKGLEWVAVISYDGSNKYYVDSVKGRFTISRDNSKNTLYLQMNSLRAEDTAVYYCRWAYWELLPDYYYGMDVWGQGTTVTVSSASGGSGDKTHTCPPCPAPELLGGPSVFLFPPKPKDTLMISRTPEVTCVVVDVSHEDPEVKFNWYVDGVEVHNAKTKPREEQYNSYVVSVLTVLHQDWLNGKEYKCKVSNKALPAPIEKTISKAKGQPREPQVYTLPPCRDELTKNQVSLWCLVKGFYPSDIAVEWESNGQPENNYKTTPPVLDSDGSFFKKLTVDKSRWQQGNVFSCSVLHEALHSHYTQKSLSLSPG

SEQ ID NO: 346 - DNA, 2172 bp, synthetic construct
  misc_feature 1..2172: note = MX1054
  source 1..2172: mol_type = other DNA
cagaccgtggtcacacaagagcctagctttagcgtgtcccctggcggcacagtgacactgacatgtggactttctagcggatctgtgtccaccgcctactttcccagctggtatcaacagaccccaggccaggcacctcggacactgatctacggcaccaacacaagatccagcggcgtgcccgataggttcagcggatctatcctgggcaacaaggccgcactgactatcacaggcgcccaggccgatgacgagagcgattactactgcgtgctgtacatgggcagaggcatcgtggtttttggcggaggcaccaagctgacagtgcttggcggatcctctggagagatcgtgatgacacagagccccgccatcctgagtgtgtctccaggcgaaagagccacactgagctgtagagcctctcagagcgtggccatcaacctggcctggtatcagcagaagcctggacaggctccccggctgctgatctatgccgcttcttctagagccacaggcatccctggcagattttctggcagcggcagcgagacaaacttcaccctgaccatcagctccctgcagagcggcgatttcgccgtgtactactgccagcagtacatcacctggccacctagctacacctttggccagggcaccaagctggaaatcaaaggaggtggtggctctggcggatctgggagtggtggcggaggctctgcttctggatctggagaagtgcagctggtggaaagtggcggagcactgattcagcctggcggctctctgagactgtcttgtgccgcctctggcatcatcgtgtccgccaactacatgagctgggtccgacaggcccctggcaaaggacttgaatgggtgtccgtgatctacagcggcggcagcaccttttacgccgactctgtgaagggcagattcaccatcagccgggacaacagcaagaacaccctgtacctggaaatgaacagcctgagagccgaggacaccgctgtgtactattgcgccagagatgcccctatcctgggcgtgtcagattggggccagggaacactggtcacagtgtctagcggaggcagctccgggcaggtccagcttgttgaaagtggcggaggggttgtgcaacccggaagatctctgagactgtcttgcgccgccagcggctttacactgtcctcttatggaatgcattgggttcgacaagctcccggcaagggactcgaatgggttgcagtgatttcctacgatggctccaacaagtattatgtcgactccgtgaaaggccggttcacaatctccagagacaactccaagaatacgctctatctccagatgaacagcctgcgggccgaagatacagccgtgtattactgcgctcgcggatgggcttactgggaactgctccctgattactattacggaatggacgtctggggacagggaacaaccgtgaccgttagctctgcttctggcggctccggagataagacccacacatgtcctccatgtcctgctccagaactgctcggcggcccttctgtgttcctgtttcctccaaagcctaaggacaccctgatgatcagcagaacccctgaagtgacctgcgtggtggtggatgtgtctcacgaggaccccgaagtgaagttcaattggtacgtggacggcgtggaagtgcacaacgccaagaccaagcctagagaggaacagtacaacagcacctacagagtggtgtccgtgctgaccgtgctgcaccaggattggctgaacggcaaagagtacaagtgcaaggtgtccaacaaggccctgcctgctcctatcgagaaaaccatcagcaaggccaagggccagcctagggaaccccaggtttacacccttcctccatgccgggatgagctgaccaagaaccaggtgtccctgtggtgtctcgtgaagggcttctaccccagcgacattgccgtggaatgggagagcaatggccagcctgagaacaactacaagacaacccctcctgtgctggacagcgacggctcattcttcctgtacagcaagctgacagtcgacaagtccagatggcagcagggcaacgtgttcagttgcagcgtgctgcacgaggccctgcacagtcactacacccagaagtccctgagcctgtctcctgga

SEQ ID NO: 347 - protein, 724 aa, synthetic construct
  REGION 1..724: note = MX1054
EIVMTQSPAILSVSPGERATLSCRASQSVAINLAWYQQKPGQAPRLLIYAASSRATGIPGRFSGSGSETNFTLTISSLQSGDFAVYYCQQYITWPPSYTFGQGTKLEIKGGSSGDTVMTQSPLSLPVTPGEPASISCRSSQSLLNSNGYNYLDWYVQKPGQSPQLLIYLGSNRASGVPDRFSGSGSGTDFTLKISRVEAEDVGVYYCMQPLQTPLFTFGPGTKVEIKGGGGSGGSGSGGGGSASGSGQVTLRESGPALVKPTQTLTLTCTFSGFSLSTRGVCVSWIRQPPGKALEWLAFIDWDDDKYYNTSLKTRLTISKDTSKNQVVLTMTNVHPVDTATYYCARISSHHGSSWCTTFDYWGQGALVTVSAGGSSGEVQLVESGGALIQPGGSLRLSCAASGIIVSANYMSWVRQAPGKGLEWVSVIYSGGSTFYADSVKGRFTISRDNSKNTLYLEMNSLRAEDTAVYYCARDAPILGVSDWGQGTLVTVSSASGGSGDKTHTCPPCPAPELLGGPSVFLFPPKPKDTLMISRTPEVTCVVVDVSHEDPEVKFNWYVDGVEVHNAKTKPREEQYNSYVVSVLTVLHQDWLNGKEYKCKVSNKALPAPIEKTISKAKGQPREPQVCTLPPSRDELTKNQVSLSCAVKGFYPSDIAVEWESNGQPENNYKTTPPVLDSDGSFFLVSKLTVDKSRWQQGNVFSCSVLHEALHSHYTQKSLSLSPG

SEQ ID NO: 348 - DNA, 2178 bp, synthetic construct
  misc_feature 1..2178: note = MX1054
  source 1..2178: mol_type = other DNA
gagatcgtgatgacacagagccccgccatcctgagtgtgtctccaggcgaaagagccacactgagctgtagagcctctcagagcgtggccatcaacctggcctggtatcagcagaagcctggacaggctccccggctgctgatctatgccgcttcttctagagccacaggcatccctggcagattttctggcagcggcagcgagacaaacttcaccctgaccatcagctccctgcagagcggcgatttcgccgtgtactactgccagcagtacatcacctggccacctagctacacctttggccagggcaccaagctggaaatcaaaggcggatcctctggagacaccgtgatgacacagagccctctgagcctgcctgtgacacctggcgaacctgccagcatcagctgtagaagcagccagagcctgctgaacagcaacggctacaactacctggattggtacgtgcagaagcccggccagtctcctcagctgctgatctacctgggcagcaatagagccagcggcgtgcccgatagattttctggctctggcagcggcaccgacttcaccctgaagatctctagagtggaagccgaggacgtgggcgtgtactactgtatgcagcctctgcagacccctctgttcacatttggccctggcaccaaggtggaaatcaaaggaggtggtggctctggcggatctgggagtggtggcggaggctctgcttctggatctggacaagtgacactgagagagtctggccccgctctggtcaagcctacacagaccctgacactgacctgcaccttcagcggcttcagcctgtctactagaggcgtgtgcgtgtcctggatcagacagcctcctggaaaggccctggaatggctggccttcatcgactgggacgacgacaagtactacaacaccagcctgaaaacccggctgaccatcagcaaggacaccagcaagaaccaggtggtgctgaccatgaccaacgtgcaccctgtggataccgccacctactactgcgccagaatcagctctcaccacggctccagctggtgtaccaccttcgattattggggccagggcgctctcgtgacagtttctgctggaggcagctccggggaagtgcagctggtggaaagtggcggagcactgattcagcctggcggctctctgagactgtcttgtgccgcctctggcatcatcgtgtccgccaactacatgagctgggtccgacaggcccctggcaaaggacttgaatgggtgtccgtgatctacagcggcggcagcaccttttacgccgactctgtgaagggcagattcaccatcagccgggacaacagcaagaacaccctgtacctggaaatgaacagcctgagagccgaggacaccgctgtgtactattgcgccagagatgcccctatcctgggcgtgtcagattggggccagggaacactggtcacagtgtctagcgcttctggcggctccggagataagacccacacatgtcctccatgtcctgctccagaactgctcggcggcccttctgtgttcctgtttcctccaaagcctaaggacaccctgatgatcagcagaacccctgaagtgacctgcgtggtggtggatgtgtctcacgaggaccccgaagtgaagttcaattggtacgtggacggcgtggaagtgcacaacgccaagaccaagcctagagaggaacagtacaacagcacctacagagtggtgtccgtgctgaccgtgctgcaccaggattggctgaacggcaaagagtacaagtgcaaggtgtccaacaaggccctgcctgctcctatcgagaaaaccatcagcaaggccaagggccagcctagggaaccccaggtttgtacccttcctccaagccgggatgagctgaccaagaaccaggtgtccctgagctgtgccgtgaagggcttctaccccagcgacattgccgtggaatgggagagcaatggccagcctgagaacaactacaagacaacccctcctgtgctggacagcgacggctcattcttcctggtgagcaagctgacagtcgacaagtccagatggcagcagggcaacgtgttcagttgcagcgtgctgcacgaggccctgcacagtcactacacccagaagtccctgagcctgtctcctgga

SEQ ID NO: 349 - protein, 718 aa, synthetic construct; identical to SEQ ID NO: 345
  REGION 1..718: note = MX1062

SEQ ID NO: 350 - DNA, 2172 bp, synthetic construct; identical to SEQ ID NO: 346
  misc_feature 1..2172: note = MX1062
  source 1..2172: mol_type = other DNA

SEQ ID NO: 351 - protein, 724 aa, synthetic construct; identical to SEQ ID NO: 313
  REGION 1..724: note = MX1062

SEQ ID NO: 352 - DNA, 2178 bp, synthetic construct; identical to SEQ ID NO: 314
  misc_feature 1..2178: note = MX1062
  source 1..2178: mol_type = other DNA

SEQ ID NO: 353 - protein, 718 aa, synthetic construct; identical to SEQ ID NO: 307
  REGION 1..718: note = MX1063

SEQ ID NO: 354 - DNA, 2172 bp, synthetic construct; identical to SEQ ID NO: 308
  misc_feature 1..2172: note = MX1063
  source 1..2172: mol_type = other DNA

SEQ ID NO: 355 - protein, 724 aa, synthetic construct; identical to SEQ ID NO: 347
  REGION 1..724: note = MX1063

SEQ ID NO: 356 - DNA, 2178 bp, synthetic construct; identical to SEQ ID NO: 348
  misc_feature 1..2178: note = MX1063
  source 1..2178: mol_type = other DNA

SEQ ID NO: 357 - protein, 718 aa, synthetic construct; identical to SEQ ID NO: 307
  REGION 1..718: note = MX1064

SEQ ID NO: 358 - DNA, 2172 bp, synthetic construct; identical to SEQ ID NO: 308
  misc_feature 1..2172: note = MX1064
  source 1..2172: mol_type = other DNA

SEQ ID NO: 359 - protein, 724 aa, synthetic construct; identical to SEQ ID NO: 313
  REGION 1..724: note = MX1064

SEQ ID NO: 360 - DNA, 2178 bp, synthetic construct; identical to SEQ ID NO: 314
  misc_feature 1..2178: note = MX1064
  source 1..2178: mol_type = other DNA

SEQ ID NO: 361 - protein, 718 aa, synthetic construct; identical to SEQ ID NO: 345
  REGION 1..718: note = MX1065

SEQ ID NO: 362 - DNA, 2172 bp, synthetic construct; identical to SEQ ID NO: 346
  misc_feature 1..2172: note = MX1065
  source 1..2172: mol_type = other DNA

SEQ ID NO: 363 - protein, 732 aa, synthetic construct
  REGION 1..732: note = MX1065
QTVVTQEPSFSVSPGGTVTLTCGLSSGSVSTAYFPSWYQQTPGQAPRTLIYGTNTRSSGVPDRFSGSILGNKAALTITGAQADDESDYYCVLYMGRGIVVFGGGTKLTVLGGSSGDTVMTQSPLSLPVTPGEPASISCRSSQSLLNSNGYNYLDWYVQKPGQSPQLLIYLGSNRASGVPDRFSGSGSGTDFTLKISRVEAEDVGVYYCMQPLQTPLFTFGPGTKVEIKGGGGSGGSGSGGGGSASGSGQVTLRESGPALVKPTQTLTLTCTFSGFSLSTRGVCVSWIRQPPGKALEWLAFIDWDDDKYYNTSLKTRLTISKDTSKNQVVLTMTNVHPVDTATYYCARISSHHGSSWCTTFDYWGQGALVTVSAGGSSGQVQLVESGGGVVQPGRSLRLSCAASGFTLSSYGMHWVRQAPGKGLEWVAVISYDGSNKYYVDSVKGRFTISRDNSKNTLYLQMNSLRAEDTAVYYCRWAYWELLPDYYYGMDVWGQGTTVTVSSASGGSGDKTHTCPPCPAPELLGGPSVFLFPPKPKDTLMISRTPEVTCVVVDVSHEDPEVKFNWYVDGVEVHNAKTKPREEQYNSYVVSVLTVLHQDWLNGKEYKCKVSNKALPAPIEKTISKAKGQPREPQVCTLPPSRDELTKNQVSLSCAVKGFYPSDIAVEWESNGQPENNYKTTPPVLDSDGSFFLVSKLTVDKSRWQQGNVFSCSVLHEALHSHYTQKSLSLSPG

SEQ ID NO: 364 - DNA, 2208 bp, synthetic construct
  misc_feature 1..2208: note = MX1065
  source 1..2208: mol_type = other DNA
cagaccgtggtcacacaagagcctagctttagcgtgtcccctggcggcacagtgacactgacatgtggactttctagcggatctgtgtccaccgcctactttcccagctggtatcaacagaccccaggccaggcacctcggacactgatctacggcaccaacacaagatccagcggcgtgcccgataggttcagcggatctatcctgggcaacaaggccgcactgactatcacaggcgcccaggccgatgacgagagcgattactactgcgtgctgtacatgggcagaggcatcgtggtttttggcggaggcaccaagctgacagtgcttggcggatcctctggagacaccgtgatgacacagagccctctgagcctgcctgtgacacctggcgaacctgccagcatcagctgtagaagcagccagagcctgctgaacagcaacggctacaactacctggattggtacgtgcagaagcccggccagtctcctcagctgctgatctacctgggcagcaatagagccagcggcgtgcccgatagattttctggctctggcagcggcaccgacttcaccctgaagatctctagagtggaagccgaggacgtgggcgtgtactactgtatgcagcctctgcagacccctctgttcacatttggccctggcaccaaggtggaaatcaaaggaggtggtggctctggcggatctgggagtggtggcggaggctctgcttctggatctggacaagtgacactgagagagtctggccccgctctggtcaagcctacacagaccctgacactgacctgcaccttcagcggcttcagcctgtctactagaggcgtgtgcgtgtcctggatcagacagcctcctggaaaggccctggaatggctggccttcatcgactgggacgacgacaagtactacaacaccagcctgaaaacccggctgaccatcagcaaggacaccagcaagaaccaggtggtgctgaccatgaccaacgtgcaccctgtggataccgccacctactactgcgccagaatcagctctcaccacggctccagctggtgtaccaccttcgattattggggccagggcgctctcgtgacagtttctgctggaggcagctccgggcaggtccagcttgttgaaagtggcggaggggttgtgcaacccggaagatctctgagactgtcttgcgccgccagcggctttacactgtcctcttatggaatgcattgggttcgacaagctcccggcaagggactcgaatgggttgcagtgatttcctacgatggctccaacaagtattatgtcgactccgtgaaaggccggttcacaatctccagagacaactccaagaatacgctctatctccagatgaacagcctgcgggccgaagatacagccgtgtattactgcgctcgcggatgggcttactgggaactgctccctgattactattacggaatggacgtctggggacagggaacaaccgtgaccgttagctctgcttctggcggctccggagataagacccacacatgtcctccatgtcctgctccagaactgctcggcggcccttctgtgttcctgtttcctccaaagcctaaggacaccctgatgatcagcagaacccctgaagtgacctgcgtggtggtggatgtgtctcacgaggaccccgaagtgaagttcaattggtacgtggacggcgtggaagtgcacaacgccaagaccaagcctagagaggaacagtacaacagcacctacagagtggtgtccgtgctgaccgtgctgcaccaggattggctgaacggcaaagagtacaagtgcaaggtgtccaacaaggccctgcctgctcctatcgagaaaaccatcagcaaggccaagggccagcctagggaaccccaggtttgtacccttcctccaagccgggatgagctgaccaagaaccaggtgtccctgagctgtgccgtgaagggcttctaccccagcgacattgccgtggaatgggagagcaatggccagcctgagaacaactacaagacaacccctcctgtgctggacagcgacggctcattcttcctggtgagcaagctgacagtcgacaagtccagatggcagcagggcaacgtgttcagttgcagcgtgctgcacgaggccctgcacagtcactacacccagaagtccctgagcctgtctcctgga

SEQ ID NO: 365 - protein, 718 aa, synthetic construct; identical to SEQ ID NO: 345
  REGION 1..718: note = MX1066

SEQ ID NO: 366 - DNA, 2172 bp, synthetic construct; identical to SEQ ID NO: 346
  misc_feature 1..2172: note = MX1066
  source 1..2172: mol_type = other DNA

SEQ ID NO: 367 - protein, 732 aa, synthetic construct
  REGION 1..732: note = MX1066
DTVMTQSPLSLPVTPGEPASISCRSSQSLLNSNGYNYLDWYVQKPGQSPQLLIYLGSNRASGVPDRFSGSGSGTDFTLKISRVEAEDVGVYYCMQPLQTPLFTFGPGTKVEIKGGSSGQTVVTQEPSFSVSPGGTVTLTCGLSSGSVSTAYFPSWYQQTPGQAPRTLIYGTNTRSSGVPDRFSGSILGNKAALTITGAQADDESDYYCVLYMGRGIVVFGGGTKLTVLGGGGSGGSGSGGGGSASGSGQVQLVESGGGVVQPGRSLRLSCAASGFTLSSYGMHWVRQAPGKGLEWVAVISYDGSNKYYVDSVKGRFTISRDNSKNTLYLQMNSLRAEDTAVYYCRWAYWELLPDYYYGMDVWGQGTTVTVSSGGSSGQVTLRESGPALVKPTQTLTLTCTFSGFSLSTRGVCVSWIRQPPGKALEWLAFIDWDDDKYYNTSLKTRLTISKDTSKNQVVLTMTNVHPVDTATYYCARISSHHGSSWCTTFDYWGQGALVTVSAASGGSGDKTHTCPPCPAPELLGGPSVFLFPPKPKDTLMISRTPEVTCVVVDVSHEDPEVKFNWYVDGVEVHNAKTKPREEQYNSYVVSVLTVLHQDWLNGKEYKCKVSNKALPAPIEKTISKAKGQPREPQVCTLPPSRDELTKNQVSLSCAVKGFYPSDIAVEWESNGQPENNYKTTPPVLDSDGSFFLVSKLTVDKSRWQQGNVFSCSVLHEALHSHYTQKSLSLSPG

SEQ ID NO: 368 - DNA, 2208 bp, synthetic construct
  misc_feature 1..2208: note = MX1066
  source 1..2208: mol_type = other DNA
gacaccgtgatgacacagagccctctgagcctgcctgtgacacctggcgaacctgccagcatcagctgtagaagcagccagagcctgctgaacagcaacggctacaactacctggattggtacgtgcagaagcccggccagtctcctcagctgctgatctacctgggcagcaatagagccagcggcgtgcccgatagattttctggctctggcagcggcaccgacttcaccctgaagatctctagagtggaagccgaggacgtgggcgtgtactactgtatgcagcctctgcagacccctctgttcacatttggccctggcaccaaggtggaaatcaaaggcggatcctctggacagaccgtcgtgacccaagaaccatcctttagcgtgtccccaggcggaaccgtcactctgacttgtggactgtctagcggctccgtgtccacagcttacttcccgtcctggtatcaacaaacacccggccaggcacctagaactctgatctatgggaccaacactagaagctccggcgtgccagacaggttctctggcagcattctgggaaacaaagctgccctgaccattaccggcgctcaggctgatgatgagtctgactactattgcgtcctctatatgggacggggaatcgtggtgttcggaggcggcacaaaactgaccgttcttggaggtggtggctctggcggatctgggagtggtggcggaggctctgcttctggatctggacaggtccagctggttgaatctggtggcggagttgtgcagcctggcagaagcctgagactgtcttgtgccgcctctggctttaccctgagcagctatggcatgcactgggtccgacaggcccctggcaaaggacttgaatgggtcgccgtgatcagctacgacggcagcaacaagtactacgtggacagcgtgaagggcagattcaccatcagccgggacaacagcaagaacaccctgtacctgcagatgaacagcctgagagccgaggacacagccgtgtattattgcgccagaggctgggcctattgggagctgctgcctgactactactacggcatggatgtgtggggccagggaaccacagtgaccgtgtctagcggaggcagctccgggcaagtgacactgagagagtctggccccgctctggtcaagcctacacagaccctgacactgacctgcaccttcagcggcttcagcctgtctactagaggcgtgtgcgtgtcctggatcagacagcctcctggaaaggccctggaatggctggccttcatcgactgggacgacgacaagtactacaacaccagcctgaaaacccggctgaccatcagcaaggacaccagcaagaaccaggtggtgctgaccatgaccaacgtgcaccctgtggataccgccacctactactgcgccagaatcagctctcaccacggctccagctggtgtaccaccttcgattattggggccagggcgctctcgtgacagtttctgctgcttctggcggctccggagataagacccacacatgtcctccatgtcctgctccagaactgctcggcggcccttctgtgttcctgtttcctccaaagcctaaggacaccctgatgatcagcagaacccctgaagtgacctgcgtggtggtggatgtgtctcacgaggaccccgaagtgaagttcaattggtacgtggacggcgtggaagtgcacaacgccaagaccaagcctagagaggaacagtacaacagcacctacagagtggtgtccgtgctgaccgtgctgcaccaggattggctgaacggcaaagagtacaagtgcaaggtgtccaacaaggccctgcctgctcctatcgagaaaaccatcagcaaggccaagggccagcctagggaaccccaggtttgtacccttcctccaagccgggatgagctgaccaagaaccaggtgtccctgagctgtgccgtgaagggcttctaccccagcgacattgccgtggaatgggagagcaatggccagcctgagaacaactacaagacaacccctcctgtgctggacagcgacggctcattcttcctggtgagcaagctgacagtcgacaagtccagatggcagcagggcaacgtgttcagttgcagcgtgctgcacgaggccctgcacagtcactacacccagaagtccctgagcctgtctcctgga

SEQ ID NO: 369 - protein, 718 aa, synthetic construct; identical to SEQ ID NO: 307
  REGION 1..718: note = MX1067

SEQ ID NO: 370 - DNA, 2172 bp, synthetic construct; identical to SEQ ID NO: 308
  misc_feature 1..2172: note = MX1067
  source 1..2172: mol_type = other DNA

SEQ ID NO: 371 - protein, 732 aa, synthetic construct; identical to SEQ ID NO: 363
  REGION 1..732: note = MX1067

SEQ ID NO: 372 - DNA, 2208 bp, synthetic construct; identical to SEQ ID NO: 364
  misc_feature 1..2208: note = MX1067
  source 1..2208: mol_type = other DNA

SEQ ID NO: 373 - protein, 718 aa, synthetic construct; identical to SEQ ID NO: 307
  REGION 1..718: note = MX1068

SEQ ID NO: 374 - DNA, 2172 bp, synthetic construct; identical to SEQ ID NO: 308
  misc_feature 1..2172: note = MX1068
  source 1..2172: mol_type = other DNA

SEQ ID NO: 375 - protein, 732 aa, synthetic construct; identical to SEQ ID NO: 367
  REGION 1..732: note = MX1068

SEQ ID NO: 376 - DNA, 2208 bp, synthetic construct; identical to SEQ ID NO: 368
  misc_feature 1..2208: note = MX1068
  source 1..2208: mol_type = other DNA

SEQ ID NO: 377 - protein, 722 aa, synthetic construct; identical to SEQ ID NO: 311
  REGION 1..722: note = MX1055

SEQ ID NO: 378 - DNA, 2178 bp, synthetic construct; identical to SEQ ID NO: 312
  misc_feature 1..2178: note = MX1055
  source 1..2178: mol_type = other DNA

SEQ ID NO: 379 - protein, 732 aa, synthetic construct; identical to SEQ ID NO: 367
  REGION 1..732: note = MX1055

SEQ ID NO: 380 - DNA, 2208 bp, synthetic construct; identical to SEQ ID NO: 368
  misc_feature 1..2208: note = MX1055
  source 1..2208: mol_type = other DNA

SEQ ID NO: 381 - protein, 722 aa, synthetic construct
  REGION 1..722: note = MX1056
DTVMTQSPLSLPVTPGEPASISCRSSQSLLNSNGYNYLDWYVQKPGQSPQLLIYLGSNRASGVPDRFSGSGSGTDFTLKISRVEAEDVGVYYCMQPLQTPLFTFGPGTKVEIKGGSSGEIVMTQSPAILSVSPGERATLSCRASQSVAINLAWYQQKPGQAPRLLIYAASSRATGIPGRFSGSGSETNFTLTISSLQSGDFAVYYCQQYITWPPSYTFGQGTKLEIKGGGGSGGSGSGGGGSASGSGEVQLVESGGALIQPGGSLRLSCAASGIIVSANYMSWVRQAPGKGLEWVSVIYSGGSTFYADSVKGRFTISRDNSKNTLYLEMNSLRAEDTAVYYCARDAPILGVSDWGQGTLVTVSSGGSSGQVTLRESGPALVKPTQTLTLTCTFSGFSLSTRGVCVSWIRQPPGKALEWLAFIDWDDDKYYNTSLKTRLTISKDTSKNQVVLTMTNVHPVDTATYYCARISSHHGSSWCTTFDYWGQGALVTVSAASGGSGDKTHTCPPCPAPELLGGPSVFLFPPKPKDTLMISRTPEVTCVVVDVSHEDPEVKFNWYVDGVEVHNAKTKPREEQYNSYVVSVLTVLHQDWLNGKEYKCKVSNKALPAPIEKTISKAKGQPREPQVYTLPPCRDELTKNQVSLWCLVKGFYPSDIAVEWESNGQPENNYKTTPPVLDSDGSFFKKLTVDKSRWQQGNVFSCSVLHEALHSHYTQKSLSLSPG

SEQ ID NO: 382 - DNA, 2178 bp, synthetic construct
  misc_feature 1..2178: note = MX1056
  source 1..2178: mol_type = other DNA
gacaccgtgatgacacagagccctctgagcctgcctgtgacacctggcgaacctgccagcatcagctgtagaagcagccagagcctgctgaacagcaacggctacaactacctggattggtacgtgcagaagcccggccagtctcctcagctgctgatctacctgggcagcaatagagccagcggcgtgcccgatagattttctggctctggcagcggcaccgacttcaccctgaagatctctagagtggaagccgaggacgtgggcgtgtactactgtatgcagcctctgcagacccctctgttcacatttggccctggcaccaaggtggaaatcaaaggcggatcctctggagagatcgtgatgacacagagccccgccatcctgagtgtgtctccaggcgaaagagccacactgagctgtagagcctctcagagcgtggccatcaacctggcctggtatcagcagaagcctggacaggctccccggctgctgatctatgccgcttcttctagagccacaggcatccctggcagattttctggcagcggcagcgagacaaacttcaccctgaccatcagctccctgcagagcggcgatttcgccgtgtactactgccagcagtacatcacctggccacctagctacacctttggccagggcaccaagctggaaatcaaaggaggtggtggctctggcggatctgggagtggtggcggaggctctgcttctggatctggagaagtgcagctggtggaaagtggcggagcactgattcagcctggcggctctctgagactgtcttgtgccgcctctggcatcatcgtgtccgccaactacatgagctgggtccgacaggcccctggcaaaggacttgaatgggtgtccgtgatctacagcggcggcagcaccttttacgccgactctgtgaagggcagattcaccatcagccgggacaacagcaagaacaccctgtacctggaaatgaacagcctgagagccgaggacaccgctgtgtactattgcgccagagatgcccctatcctgggcgtgtcagattggggccagggaacactggtcacagtgtctagcggaggcagctccgggcaagtgacactgagagagtctggccccgctctggtcaagcctacacagaccctgacactgacctgcaccttcagcggcttcagcctgtctactagaggcgtgtgcgtgtcctggatcagacagcctcctggaaaggccctggaatggctggccttcatcgactgggacgacgacaagtactacaacaccagcctgaaaacccggctgaccatcagcaaggacaccagcaagaaccaggtggtgctgaccatgaccaacgtgcaccctgtggataccgccacctactactgcgccagaatcagctctcaccacggctccagctggtgtaccaccttcgattattggggccagggcgctctcgtgacagtttctgctgcttctggcggctccggagataagacccacacatgtcctccatgtcctgctccagaactgctcggcggcccttctgtgttcctgtttcctccaaagcctaaggacaccctgatgatcagcagaacccctgaagtgacctgcgtggtggtggatgtgtctcacgaggaccccgaagtgaagttcaattggtacgtggacggcgtggaagtgcacaacgccaagaccaagcctagagaggaacagtacaacagcacctacagagtggtgtccgtgctgaccgtgctgcaccaggattggctgaacggcaaagagtacaagtgcaaggtgtccaacaaggccctgcctgctcctatcgagaaaaccatcagcaaggccaagggccagcctagggaaccccaggtttacacccttcctccatgccgggatgagctgaccaagaaccaggtgtccctgtggtgtctcgtgaagggcttctaccccagcgacattgccgtggaatgggagagcaatggccagcctgagaacaactacaagacaacccctcctgtgctggacagcgacggctcattcttcctgtacagcaagctgacagtcgacaagtccagatggcagcagggcaacgtgttcagttgcagcgtgctgcacgaggccctgcacagtcactacacccagaagtccctgagcctgtctcctgga

SEQ ID NO: 383 - protein, 732 aa, synthetic construct; identical to SEQ ID NO: 367
  REGION 1..732: note = MX1056

SEQ ID NO: 384 - DNA, 2208 bp, synthetic construct; identical to SEQ ID NO: 368
  misc_feature 1..2208: note = MX1056
  source 1..2208: mol_type = other DNA

SEQ ID NO: 385 - protein, 730 aa, synthetic construct
  REGION 1..730: note = MX1057
QTVVTQEPSFSVSPGGTVTLTCGLSSGSVSTAYFPSWYQQTPGQAPRTLIYGTNTRSSGVPDRFSGSILGNKAALTITGAQADDESDYYCVLYMGRGIVVFGGGTKLTVLGGSSGDTVMTQSPLSLPVTPGEPASISCRSSQSLLNSNGYNYLDWYVQKPGQSPQLLIYLGSNRASGVPDRFSGSGSGTDFTLKISRVEAEDVGVYYCMQPLQTPLFTFGPGTKVEIKGGGGSGGSGSGGGGSASGSGQVTLRESGPALVKPTQTLTLTCTFSGFSLSTRGVCVSWIRQPPGKALEWLAFIDWDDDKYYNTSLKTRLTISKDTSKNQVVLTMTNVHPVDTATYYCARISSHHGSSWCTTFDYWGQGALVTVSAGGSSGQVQLVESGGGVVQPGRSLRLSCAASGFTLSSYGMHWVRQAPGKGLEWVAVISYDGSNKYYVDSVKGRFTISRDNSKNTLYLQMNSLRAEDTAVYYCRWAYWELLPDYYYGMDVWGQGTTVTVSSASGGSGDKTHTCPPCPAPELLGGPSVFLFPPKPKDTLMISRTPEVTCVVVDVSHEDPEVKFNWYVDGVEVHNAKTKPREEQYNSYVVSVLTVLHQDWLNGKEYKCKVSNKALPAPIEKTISKAKGQPREPQVYTLPPCRDELTKNQVSLWCLVKGFYPSDIAVEWESNGQPENNYKTTPPVLDSDGSFFKKLTVDKSRWQQGNVFSCSVLHEALHSHYTQKSLSLSPG

SEQ ID NO: 386 - DNA, 2208 bp, synthetic construct
  misc_feature 1..2208: note = MX1057
  source 1..2208: mol_type = other DNA
cagaccgtggtcacacaagagcctagctttagcgtgtcccctggcggcacagtgacactgacatgtggactttctagcggatctgtgtccaccgcctactttcccagctggtatcaacagaccccaggccaggcacctcggacactgatctacggcaccaacacaagatccagcggcgtgcccgataggttcagcggatctatcctgggcaacaaggccgcactgactatcacaggcgcccaggccgatgacgagagcgattactactgcgtgctgtacatgggcagaggcatcgtggtttttggcggaggcaccaagctgacagtgcttggcggatcctctggagacaccgtgatgacacagagccctctgagcctgcctgtgacacctggcgaacctgccagcatcagctgtagaagcagccagagcctgctgaacagcaacggctacaactacctggattggtacgtgcagaagcccggccagtctcctcagctgctgatctacctgggcagcaatagagccagcggcgtgcccgatagattttctggctctggcagcggcaccgacttcaccctgaagatctctagagtggaagccgaggacgtgggcgtgtactactgtatgcagcctctgcagacccctctgttcacatttggccctggcaccaaggtggaaatcaaaggaggtggtggctctggcggatctgggagtggtggcggaggctctgcttctggatctggacaagtgacactgagagagtctggccccgctctggtcaagcctacacagaccctgacactgacctgcaccttcagcggcttcagcctgtctactagaggcgtgtgcgtgtcctggatcagacagcctcctggaaaggccctggaatggctggccttcatcgactgggacgacgacaagtactacaacaccagcctgaaaacccggctgaccatcagcaaggacaccagcaagaaccaggtggtgctgaccatgaccaacgtgcaccctgtggataccgccacctactactgcgccagaatcagctctcaccacggctccagctggtgtaccaccttcgattattggggccagggcgctctcgtgacagtttctgctggaggcagctccgggcaggtccagcttgttgaaagtggcggaggggttgtgcaacccggaagatctctgagactgtcttgcgccgccagcggctttacactgtcctcttatggaatgcattgggttcgacaagctcccggcaagggactcgaatgggttgcagtgatttcctacgatggctccaacaagtattatgtcgactccgtgaaaggccggttcacaatctccagagacaactccaagaatacgctctatctccagatgaacagcctgcgggccgaagatacagccgtgtattactgcgctcgcggatgggcttactgggaactgctccctgattactattacggaatggacgtctggggacagggaacaaccgtgaccgttagctctgcttctggcggctccggagataagacccacacatgtcctccatgtcctgctccagaactgctcggcggcccttctgtgttcctgtttcctccaaagcctaaggacaccctgatgatcagcagaacccctgaagtgacctgcgtggtggtggatgtgtctcacgaggaccccgaagtgaagttcaattggtacgtggacggcgtggaagtgcacaacgccaagaccaagcctagagaggaacagtacaacagcacctacagagtggtgtccgtgctgaccgtgctgcaccaggattggctgaacggcaaagagtacaagtgcaaggtgtccaacaaggccctgcctgctcctatcgagaaaaccatcagcaaggccaagggccagcctagggaaccccaggtttacacccttcctccatgccgggatgagctgaccaagaaccaggtgtccctgtggtgtctcgtgaagggcttctaccccagcgacattgccgtggaatgggagagcaatggccagcctgagaacaactacaagacaacccctcctgtgctggacagcgacggctcattcttcctgtacagcaagctgacagtcgacaagtccagatggcagcagggcaacgtgttcagttgcagcgtgctgcacgaggccctgcacagtcactacacccagaagtccctgagcctgtctcctgga

SEQ ID NO: 387 - protein, 724 aa, synthetic construct; identical to SEQ ID NO: 347
  REGION 1..724: note = MX1057

SEQ ID NO: 388 - DNA, 2178 bp, synthetic construct; identical to SEQ ID NO: 348
  misc_feature 1..2178: note = MX1057
  source 1..2178: mol_type = other DNA

SEQ ID NO: 389 - protein, 730 aa, synthetic construct; identical to SEQ ID NO: 385
  REGION 1..730: note = MX1058

SEQ ID NO: 390 - DNA, 2208 bp, synthetic construct; identical to SEQ ID NO: 386
  misc_feature 1..2208: note = MX1058
  source 1..2208: mol_type = other DNA

SEQ ID NO: 391 - protein, 724 aa, synthetic construct; identical to SEQ ID NO: 313
  REGION 1..724: note = MX1058

SEQ ID NO: 392 - DNA, 2178 bp, synthetic construct; identical to SEQ ID NO: 314
  misc_feature 1..2178: note = MX1058
  source 1..2178: mol_type = other DNA

SEQ ID NO: 393 - protein, 2172 aa, synthetic construct
  REGION 1..2172: note = MX1069
CAGACCGTGGTCACACAAGAGCCTAGCTTTAGCGTGTCCCCTGGCGGCACAGTGACACTGACATGTGGACTTTCTAGCGGATCTGTGTCCACCGCCTACTTTCCCAGCTGGTATCAACAGACCCCAGGCCAGGCACCTCGGACACTGATCTACGGCACCAACACAAGATCCAGCGGCGTGCCCGATAGGTTCAGCGGATCTATCCTGGGCAACAAGGCCGCACTGACTATCACAGGCGCCCAGGCCGATGACGAGAGCGATTACTACTGCGTGCTGTACATGGGCAGAGGCATCGTGGTTTTTGGCGGAGGCACCAAGCTGACAGTGCTTGGCGGATCCTCTGGAGAGATCGTGCTGACACAGAGCCCTGGCACACTGTCACTGTCTCCAGGCGAAACAGCCACACTGAGCTGTAGAGCCAGCCAGAGCTTCAGCAGCGACCTGGCTTGGTATCAGCAGAAGCCTGGACAGGCCCCTCGGCTGTTGATCTATGGCGCCTCTTCTAGAGCCACAGGCATCCCCGATAGATTCAGCGGCTCTGGCAGCGGCACCGATTTCACCCTGACAATCAGCAGACTGGAACCCGCCGACTTCGCCGTGTACTACTGTCAGCAGTACGGCAGCAGCCCTCCTGTGACATTTGGCGGCGGAACAAAGGTGGAAATCAAAGGAGGTGGTGGCTCTGGCGGATCTGGGAGTGGTGGCGGAGGCTCTGCTTCTGGATCTGGAGAAGTGCAGCTGGTGGAATCAGGCGGCGGACTGATTCAACCTGGCGGCTCTCTGAGACTGTCTTGTGCTGCTTCTGGCGTGATCGTGTCCTACAACTACATGAACTGGGTCCGACAGGCTCCCGGCAAAGGCCTTGAATGGGTGTCCGTGATCTACAGCGGCGGCAGCACCTTTTACGCCGATTCTGTGCGGGGCAGATTCACCATCAGCCGGGACAACAGCAAGAACACCCTGTACCTGCAGATGAACAGCCTGAGAGCCGAGGACACCGCTGTGTACTATTGCGCCAGAGATCTGGGACCTGCCGGCGCTTTTGATATCTGGGGCCTGGGCACAATGGTCACCGTGTCTAGCGGAGGCAGCTCCGGGCAGGTCCAGCTTGTTGAAAGTGGCGGAGGGGTTGTGCAACCCGGAAGATCTCTGAGACTGTCTTGCGCCGCCAGCGGCTTTACACTGTCCTCTTATGGAATGCATTGGGTTCGACAAGCTCCCGGCAAGGGACTCGAATGGGTTGCAGTGATTTCCTACGATGGCTCCAACAAGTATTATGTCGACTCCGTGAAAGGCCGGTTCACAATCTCCAGAGACAACTCCAAGAATACGCTCTATCTCCAGATGAACAGCCTGCGGGCCGAAGATACAGCCGTGTATTACTGCGCTCGCGGATGGGCTTACTGGGAACTGCTCCCTGATTACTATTACGGAATGGACGTCTGGGGACAGGGAACAACCGTGACCGTTAGCTCTGCTTCTGGCGGCTCCGGAGATAAGACCCACACATGTCCTCCATGTCCTGCTCCAGAACTGCTCGGCGGCCCTTCTGTGTTCCTGTTTCCTCCAAAGCCTAAGGACACCCTGATGATCAGCAGAACCCCTGAAGTGACCTGCGTGGTGGTGGATGTGTCTCACGAGGACCCCGAAGTGAAGTTCAATTGGTACGTGGACGGCGTGGAAGTGCACAACGCCAAGACCAAGCCTAGAGAGGAACAGTACAACAGCACCTACAGAGTGGTGTCCGTGCTGACCGTGCTGCACCAGGATTGGCTGAACGGCAAAGAGTACAAGTGCAAGGTGTCCAACAAGGCCCTGCCTGCTCCTATCGAGAAAACCATCAGCAAGGCCAAGGGCCAGCCTAGGGAACCCCAGGTTTACACCCTTCCTCCATGCCGGGATGAGCTGACCAAGAACCAGGTGTCCCTGTGGTGTCTCGTGAAGGGCTTCTACCCCAGCGACATTGCCGTGGAATGGGAGAGCAATGGCCAGCCTGAGAACAACTACAAGACAACCCCTCCTGTGCTGGACAGCGACGGCTCATTCTTCCTGTACAGCAAGCTGACAGTCGACAAGTCCAGATGGCAGCAGGGCAACGTGTTCAGTTGCAGCGTGCTGCACGAGGCCCTGCACAGTCACTACACCCAGAAGTCCCTGAGCCTGTCTCCTGGA

SEQ ID NO: 394 - DNA, 2178 bp, synthetic construct
  misc_feature 1..2178: note = MX1069
  source 1..2178: mol_type = other DNA
gagatcgtgctgacacagagccctggcacactgtcactgtctccaggcgaaacagccacactgagctgtagagccagccagagcttcagcagcgacctggcttggtatcagcagaagcctggacaggcccctcggctgttgatctatggcgcctcttctagagccacaggcatccccgatagattcagcggctctggcagcggcaccgatttcaccctgacaatcagcagactggaacccgccgacttcgccgtgtactactgtcagcagtacggcagcagccctcctgtgacatttggcggcggaacaaaggtggaaatcaaaggcggatcctctggagacaccgtgatgacacagagccctctgagcctgcctgtgacacctggcgaacctgccagcatcagctgtagaagcagccagagcctgctgaacagcaacggctacaactacctggattggtacgtgcagaagcccggccagtctcctcagctgctgatctacctgggcagcaatagagccagcggcgtgcccgatagattttctggctctggcagcggcaccgacttcaccctgaagatctctagagtggaagccgaggacgtgggcgtgtactactgtatgcagcctctgcagacccctctgttcacatttggccctggcaccaaggtggaaatcaaaggaggtggtggctctggcggatctgggagtggtggcggaggctctgcttctggatctggacaagtgacactgagagagtctggccccgctctggtcaagcctacacagaccctgacactgacctgcaccttcagcggcttcagcctgtctactagaggcgtgtgcgtgtcctggatcagacagcctcctggaaaggccctggaatggctggccttcatcgactgggacgacgacaagtactacaacaccagcctgaaaacccggctgaccatcagcaaggacaccagcaagaaccaggtggtgctgaccatgaccaacgtgcaccctgtggataccgccacctactactgcgccagaatcagctctcaccacggctccagctggtgtaccaccttcgattattggggccagggcgctctcgtgacagtttctgctggaggcagctccggggaagtgcagctggtggaatcaggcggcggactgattcaacctggcggctctctgagactgtcttgtgctgcttctggcgtgatcgtgtcctacaactacatgaactgggtccgacaggctcccggcaaaggccttgaatgggtgtccgtgatctacagcggcggcagcaccttttacgccgattctgtgcggggcagattcaccatcagccgggacaacagcaagaacaccctgtacctgcagatgaacagcctgagagccgaggacaccgctgtgtactattgcgccagagatctgggacctgccggcgcttttgatatctggggcctgggcacaatggtcaccgtgtctagcgcttctggcggctccggagataagacccacacatgtcctccatgtcctgctccagaactgctcggcggcccttctgtgttcctgtttcctccaaagcctaaggacaccctgatgatcagcagaacccctgaagtgacctgcgtggtggtggatgtgtctcacgaggaccccgaagtgaagttcaattggtacgtggacggcgtggaagtgcacaacgccaagaccaagcctagagaggaacagtacaacagcacctacagagtggtgtccgtgctgaccgtgctgcaccaggattggctgaacggcaaagagtacaagtgcaaggtgtccaacaaggccctgcctgctcctatcgagaaaaccatcagcaaggccaagggccagcctagggaaccccaggtttgtacccttcctccaagccgggatgagctgaccaagaaccaggtgtccctgagctgtgccgtgaagggcttctaccccagcgacattgccgtggaatgggagagcaatggccagcctgagaacaactacaagacaacccctcctgtgctggacagcgacggctcattcttcctggtgagcaagctgacagtcgacaagtccagatggcagcagggcaacgtgttcagttgcagcgtgctgcacgaggccctgcacagtcactacacccagaagtccctgagcctgtctcctgga

SEQ ID NO: 395 - protein, 718 aa, synthetic construct; identical to SEQ ID NO: 257
  REGION 1..718: note = MX1070

SEQ ID NO: 396 - DNA, 2172 bp, synthetic construct
  misc_feature 1..2172: note = MX1070
  source 1..2172: mol_type = other DNA
cagaccgtggtcacacaagagcctagctttagcgtgtcccctggcggcacagtgacactgacatgtggactttctagcggatctgtgtccaccgcctactttcccagctggtatcaacagaccccaggccaggcacctcggacactgatctacggcaccaacacaagatccagcggcgtgcccgataggttcagcggatctatcctgggcaacaaggccgcactgactatcacaggcgcccaggccgatgacgagagcgattactactgcgtgctgtacatgggcagaggcatcgtggtttttggcggaggcaccaagctgacagtgcttggcggatcctctggagagatcgtgctgacacagagccctggcacactgtcactgtctccaggcgaaacagccacactgagctgtagagccagccagagcttcagcagcgacctggcttggtatcagcagaagcctggacaggcccctcggctgttgatctatggcgcctcttctagagccacaggcatccccgatagattcagcggctctggcagcggcaccgatttcaccctgacaatcagcagactggaacccgccgacttcgccgtgtactactgtcagcagtacggcagcagccctcctgtgacatttggcggcggaacaaaggtggaaatcaaaggaggtggtggctctggcggatctgggagtggtggcggaggctctgcttctggatctggagaagtgcagctggtggaatcaggcggcggactgattcaacctggcggctctctgagactgtcttgtgctgcttctggcgtgatcgtgtcctacaactacatgaactgggtccgacaggctcccggcaaaggccttgaatgggtgtccgtgatctacagcggcggcagcaccttttacgccgattctgtgcggggcagattcaccatcagccgggacaacagcaagaacaccctgtacctgcagatgaacagcctgagagccgaggacaccgctgtgtactattgcgccagagatctgggacctgccggcgcttttgatatctggggcctgggcacaatggtcaccgtgtctagcggaggcagctccgggcaggtccagcttgttgaaagtggcggaggggttgtgcaacccggaagatctctgagactgtcttgcgccgccagcggctttacactgtcctcttatggaatgcattgggttcgacaagctcccggcaagggactcgaatgggttgcagtgatttcctacgatggctccaacaagtattatgtcgactccgtgaaaggccggttcacaatctccagagacaactccaagaatacgctctatctccagatgaacagcctgcgggccgaagatacagccgtgtattactgcgctcgcggatgggcttactgggaactgctccctgattactattacggaatggacgtctggggacagggaacaaccgtgaccgttagctctgcttctggcggctccggagataagacccacacatgtcctccatgtcctgctccagaactgctcggcggcccttctgtgttcctgtttcctccaaagcctaaggacaccctgatgatcagcagaacccctgaagtgacctgcgtggtggtggatgtgtctcacgaggaccccgaagtgaagttcaattggtacgtggacggcgtggaagtgcacaacgccaagaccaagcctagagaggaacagtacaacagcacctacagagtggtgtccgtgctgaccgtgctgcaccaggattggctgaacggcaaagagtacaagtgcaaggtgtccaacaaggccctgcctgctcctatcgagaaaaccatcagcaaggccaagggccagcctagggaaccccaggtttacacccttcctccatgccgggatgagctgaccaagaaccaggtgtccctgtggtgtctcgtgaagggcttctaccccagcgacattgccgtggaatgggagagcaatggccagcctgagaacaactacaagacaacccctcctgtgctggacagcgacggctcattcttcctgtacagcaagctgacagtcgacaagtccagatggcagcagggcaacgtgttcagttgcagcgtgctgcacgaggccctgcacagtcactacacccagaagtccctgagcctgtctcctgga

SEQ ID NO: 397 - protein, 724 aa, synthetic construct; identical to SEQ ID NO: 327
  REGION 1..724: note = MX1070

SEQ ID NO: 398 - DNA, 2178 bp, synthetic construct; identical to SEQ ID NO: 328
  misc_feature 1..2178: note = MX1070
  source 1..2178: mol_type = other DNA

SEQ ID NO: 399 - protein, 718 aa, synthetic construct; identical to SEQ ID NO: 321
  REGION 1..718: note = MX1071

SEQ ID NO: 400 - DNA, 2172 bp, synthetic construct
  misc_feature 1..2172: note = MX1071
  source 1..2172: mol_type = other DNA
gagatcgtgctgacacagagccctggcacactgtcactgtctccaggcgaaacagccacactgagctgtagagccagccagagcttcagcagcgacctggcttggtatcagcagaagcctggacaggcccctcggctgttgatctatggcgcctcttctagagccacaggcatccccgatagattcagcggctctggcagcggcaccgatttcaccctgacaatcagcagactggaacccgccgacttcgccgtgtactactgtcagcagtacggcagcagccctcctgtgacatttggcggcggaacaaaggtggaaatcaaaggcggatcctctggacagaccgtcgtgacccaagaaccatcctttagcgtgtccccaggcggaaccgtcactctgacttgtggactgtctagcggctccgtgtccacagcttacttcccgtcctggtatcaacaaacacccggccaggcacctagaactctgatctatgggaccaacactagaagctccggcgtgccagacaggttctctggcagcattctgggaaacaaagctgccctgaccattaccggcgctcaggctgatgatgagtctgactactattgcgtcctctatatgggacggggaatcgtggtgttcggaggcggcacaaaactgaccgttcttggaggtggtggctctggcggatctgggagtggtggcggaggctctgcttctggatctggacaggtccagctggttgaatctggtggcggagttgtgcagcctggcagaagcctgagactgtcttgtgccgcctctggctttaccctgagcagctatggcatgcactgggtccgacaggcccctggcaaaggacttgaatgggtcgccgtgatcagctacgacggcagcaacaagtactacgtggacagcgtgaagggcagattcaccatcagccgggacaacagcaagaacaccctgtacctgcagatgaacagcctgagagccgaggacacagccgtgtattattgcgccagaggctgggcctattgggagctgctgcctgactactactacggcatggatgtgtggggccagggaaccacagtgaccgtgtctagcggaggcagctccggggaagtgcagctggtggaatcaggcggcggactgattcaacctggcggctctctgagactgtcttgtgctgcttctggcgtgatcgtgtcctacaactacatgaactgggtccgacaggctcccggcaaaggccttgaatgggtgtccgtgatctacagcggcggcagcaccttttacgccgattctgtgcggggcagattcaccatcagccgggacaacagcaagaacaccctgtacctgcagatgaacagcctgagagccgaggacaccgctgtgtactattgcgccagagatctgggacctgccggcgcttttgatatctggggcctgggcacaatggtcaccgtgtctagcgcttctggcggctccggagataagacccacacatgtcctccatgtcctgctccagaactgctcggcggcccttctgtgttcctgtttcctccaaagcctaaggacaccctgatgatcagcagaacccctgaagtgacctgcgtggtggtggatgtgtctcacgaggaccccgaagtgaagttcaattggtacgtggacggcgtggaagtgcacaacgccaagaccaagcctagagaggaacagtacaacagcacctacagagtggtgtccgtgctgaccgtgctgcaccaggattggctgaacggcaaagagtacaagtgcaaggtgtccaacaaggccctgcctgctcctatcgagaaaaccatcagcaaggccaagggccagcctagggaaccccaggtttacacccttcctccatgccgggatgagctgaccaagaaccaggtgtccctgtggtgtctcgtgaagggcttctaccccagcgacattgccgtggaatgggagagcaatggccagcctgagaacaactacaagacaacccctcctgtgctggacagcgacggctcattcttcctgtacagcaagctgacagtcgacaagtccagatggcagcagggcaacgtgttcagttgcagcgtgctgcacgaggccctgcacagtcactacacccagaagtccctgagcctgtctcctgga

SEQ ID NO: 401 - protein, 724 aa, synthetic construct; identical to SEQ ID NO: 258
  REGION 1..724: note = MX1071

SEQ ID NO: 402 - DNA, 2178 bp, synthetic construct; identical to SEQ ID NO: 394
  misc_feature 1..2178: note = MX1071
  source 1..2178: mol_type = other DNA

SEQ ID NO: 403 - protein, 718 aa, synthetic construct; identical to SEQ ID NO: 321
  REGION 1..718: note = MX1072

SEQ ID NO: 404 - DNA, 2172 bp, synthetic construct; identical to SEQ ID NO: 400
  misc_feature 1..2172: note = MX1072
  source 1..2172: mol_type = other DNA

SEQ ID NO: 405 - protein, 724 aa, synthetic construct; identical to SEQ ID NO: 327
  REGION 1..724: note = MX1072

SEQ ID NO: 406 - DNA, 2178 bp, synthetic construct; identical to SEQ ID NO: 328
  misc_feature 1..2178: note = MX1072
  source 1..2178: mol_type = other DNA

SEQ ID NO: 407 - protein, 718 aa, synthetic construct; identical to SEQ ID NO: 257
  REGION 1..718: note = MX1073

SEQ ID NO: 408 - DNA, 2172 bp, synthetic construct; identical to SEQ ID NO: 396
  misc_feature 1..2172: note = MX1073
  source 1..2172: mol_type = other DNA

SEQ ID NO: 409 - protein, 732 aa, synthetic construct; identical to SEQ ID NO: 363
  REGION 1..732: note = MX1073

SEQ ID NO: 410 - DNA, 2208 bp, synthetic construct; identical to SEQ ID NO: 364
  misc_feature 1..2208: note = MX1073
  source 1..2208: mol_type = other DNA

SEQ ID NO: 411 - protein, 718 aa, synthetic construct; identical to SEQ ID NO: 257
  REGION 1..718: note = MX1074

SEQ ID NO: 412 - DNA, 2172 bp, synthetic construct; identical to SEQ ID NO: 396
  misc_feature 1..2172: note = MX1074
  source 1..2172: mol_type = other DNA

SEQ ID NO: 413 - protein, 732 aa, synthetic construct; identical to SEQ ID NO: 367
  REGION 1..732: note = MX1074

SEQ ID NO: 414 - DNA, 2208 bp, synthetic construct; identical to SEQ ID NO: 368
  misc_feature 1..2208: note = MX1074
  source 1..2208: mol_type = other DNA

SEQ ID NO: 415 - protein, 718 aa, synthetic construct; identical to SEQ ID NO: 321
  REGION 1..718: note = MX1075

SEQ ID NO: 416 - DNA, 2172 bp, synthetic construct; identical to SEQ ID NO: 400
  misc_feature 1..2172: note = MX1075
  source 1..2172: mol_type = other DNA

SEQ ID NO: 417 - protein, 732 aa, synthetic construct; identical to SEQ ID NO: 363
  REGION 1..732: note = MX1075

SEQ ID NO: 418 - DNA, 2208 bp, synthetic construct; identical to SEQ ID NO: 364
  misc_feature 1..2208: note = MX1075
  source 1..2208: mol_type = other DNA

SEQ ID NO: 419 - protein, 718 aa, synthetic construct; identical to SEQ ID NO: 321
  REGION 1..718: note = MX1076

SEQ ID NO: 420 - DNA, 2172 bp, synthetic construct; identical to SEQ ID NO: 400
  misc_feature 1..2172: note = MX1076
  source 1..2172: mol_type = other DNA

SEQ ID NO: 421 - protein, 732 aa, synthetic construct; identical to SEQ ID NO: 367
  REGION 1..732: note = MX1076

SEQ ID NO: 422 - DNA, 2208 bp, synthetic construct; identical to SEQ ID NO: 368
  misc_feature 1..2208: note = MX1076
  source 1..2208: mol_type = other DNA

SEQ ID NO: 423 - protein, 722 aa, synthetic construct; identical to SEQ ID NO: 325
  REGION 1..722: note = MX1077

SEQ ID NO: 424 - DNA, 2178 bp, synthetic construct; identical to SEQ ID NO: 326
  misc_feature 1..2178: note = MX1077
  source 1..2178: mol_type = other DNA

SEQ ID NO: 425 - protein, 732 aa, synthetic construct; identical to SEQ ID NO: 367
  REGION 1..732: note = MX1077

SEQ ID NO: 426 - DNA, 2208 bp, synthetic construct; identical to SEQ ID NO: 368
  misc_feature 1..2208: note = MX1077
  source 1..2208: mol_type = other DNA

SEQ ID NO: 427 - protein, 722 aa, synthetic construct
  REGION 1..722: note = MX1078
DTVMTQSPLSLPVTPGEPASISCRSSQSLLNSNGYNYLDWYVQKPGQSPQLLIYLGSNRASGVPDRFSGSGSGTDFTLKISRVEAEDVGVYYCMQPLQTPLFTFGPGTKVEIKGGSSGEIVLTQSPGTLSLSPGETATLSCRASQSFSSDLAWYQQKPGQAPRLLIYGASSRATGIPDRFSGSGSGTDFTLTISRLEPADFAVYYCQQYGSSPPVTFGGGTKVEIKGGGGSGGSGSGGGGSASGSGEVQLVESGGGLIQPGGSLRLSCAASGVIVSYNYMNWVRQAPGKGLEWVSVIYSGGSTFYADSVRGRFTISRDNSKNTLYLQMNSLRAEDTAVYYCARDLGPAGAFDIWGLGTMVTVSSGGSSGQVTLRESGPALVKPTQTLTLTCTFSGFSLSTRGVCVSWIRQPPGKALEWLAFIDWDDDKYYNTSLKTRLTISKDTSKNQVVLTMTNVHPVDTATYYCARISSHHGSSWCTTFDYWGQGALVTVSAASGGSGDKTHTCPPCPAPELLGGPSVFLFPPKPKDTLMISRTPEVTCVVVDVSHEDPEVKFNWYVDGVEVHNAKTKPREEQYNSYVVSVLTVLHQDWLNGKEYKCKVSNKALPAPIEKTISKAKGQPREPQVYTLPPCRDELTKNQVSLWCLVKGFYPSDIAVEWESNGQPENNYKTTPPVLDSDGSFFKKLTVDKSRWQQGNVFSCSVLHEALHSHYTQKSLSLSPG

SEQ ID NO: 428 - DNA, 2178 bp, synthetic construct
  misc_feature 1..2178: note = MX1078
  source 1..2178: mol_type = other DNA
gacaccgtgatgacacagagccctctgagcctgcctgtgacacctggcgaacctgccagcatcagctgtagaagcagccagagcctgctgaacagcaacggctacaactacctggattggtacgtgcagaagcccggccagtctcctcagctgctgatctacctgggcagcaatagagccagcggcgtgcccgatagattttctggctctggcagcggcaccgacttcaccctgaagatctctagagtggaagccgaggacgtgggcgtgtactactgtatgcagcctctgcagacccctctgttcacatttggccctggcaccaaggtggaaatcaaaggcggatcctctggagagatcgtgctgacacagagccctggcacactgtcactgtctccaggcgaaacagccacactgagctgtagagccagccagagcttcagcagcgacctggcttggtatcagcagaagcctggacaggcccctcggctgttgatctatggcgcctcttctagagccacaggcatccccgatagattcagcggctctggcagcggcaccgatttcaccctgacaatcagcagactggaacccgccgacttcgccgtgtactactgtcagcagtacggcagcagccctcctgtgacatttggcggcggaacaaaggtggaaatcaaaggaggtggtggctctggcggatctgggagtggtggcggaggctctgcttctggatctggagaagtgcagctggtggaatcaggcggcggactgattcaacctggcggctctctgagactgtcttgtgctgcttctggcgtgatcgtgtcctacaactacatgaactgggtccgacaggctcccggcaaaggccttgaatgggtgtccgtgatctacagcggcggcagcaccttttacgccgattctgtgcggggcagattcaccatcagccgggacaacagcaagaacaccctgtacctgcagatgaacagcctgagagccgaggacaccgctgtgtactattgcgccagagatctgggacctgccggcgcttttgatatctggggcctgggcacaatggtcaccgtgtctagcggaggcagctccgggcaagtgacactgagagagtctggccccgctctggtcaagcctacacagaccctgacactgacctgcaccttcagcggcttcagcctgtctactagaggcgtgtgcgtgtcctggatcagacagcctcctggaaaggccctggaatggctggccttcatcgactgggacgacgacaagtactacaacaccagcctgaaaacccggctgaccatcagcaaggacaccagcaagaaccaggtggtgctgaccatgaccaacgtgcaccctgtggataccgccacctactactgcgccagaatcagctctcaccacggctccagctggtgtaccaccttcgattattggggccagggcgctctcgtgacagtttctgctgcttctggcggctccggagataagacccacacatgtcctccatgtcctgctccagaactgctcggcggcccttctgtgttcctgtttcctccaaagcctaaggacaccctgatgatcagcagaacccctgaagtgacctgcgtggtggtggatgtgtctcacgaggaccccgaagtgaagttcaattggtacgtggacggcgtggaagtgcacaacgccaagaccaagcctagagaggaacagtacaacagcacctacagagtggtgtccgtgctgaccgtgctgcaccaggattggctgaacggcaaagagtacaagtgcaaggtgtccaacaaggccctgcctgctcctatcgagaaaaccatcagcaaggccaagggccagcctagggaaccccaggtttacacccttcctccatgccgggatgagctgaccaagaaccaggtgtccctgtggtgtctcgtgaagggcttctaccccagcgacattgccgtggaatgggagagcaatggccagcctgagaacaactacaagacaacccctcctgtgctggacagcgacggctcattcttcctgtacagcaagctgacagtcgacaagtccagatggcagcagggcaacgtgttcagttgcagcgtgctgcacgaggccctgcacagtcactacacccagaagtccctgagcctgtctcctgga

SEQ ID NO: 429 - protein, 732 aa, synthetic construct; identical to SEQ ID NO: 367
  REGION 1..732: note = MX1078

SEQ ID NO: 430 - DNA, 2208 bp, synthetic construct; identical to SEQ ID NO: 368
  misc_feature 1..2208: note = MX1078
  source 1..2208: mol_type = other DNA

SEQ ID NO: 431 - protein, 730 aa, synthetic construct; identical to SEQ ID NO: 385
  REGION 1..730: note = MX1079

SEQ ID NO: 432 - DNA, 2208 bp, synthetic construct; identical to SEQ ID NO: 386
  misc_feature 1..2208: note = MX1079
  source 1..2208: mol_type = other DNA

SEQ ID NO: 433 - protein, 724 aa, synthetic construct; identical to SEQ ID NO: 258
  REGION 1..724: note = MX1079

SEQ ID NO: 434 - DNA, 2178 bp, synthetic construct; identical to SEQ ID NO: 394
  misc_feature 1..2178: note = MX1079
  source 1..2178: mol_type = other DNA

SEQ ID NO: 435 - protein, 730 aa, synthetic construct; identical to SEQ ID NO: 385
  REGION 1..730: note = MX1080

SEQ ID NO: 436 - DNA, 2208 bp, synthetic construct; identical to SEQ ID NO: 386
  misc_feature 1..2208: note = MX1080
  source 1..2208: mol_type = other DNA

SEQ ID NO: 437 - protein, 724 aa, synthetic construct; identical to SEQ ID NO: 327
  REGION 1..724: note = MX1080

SEQ ID NO: 438 - DNA, 2178 bp, synthetic construct; identical to SEQ ID NO: 328
  misc_feature 1..2178: note = MX1080
  source 1..2178: mol_type = other DNA

SEQ ID NO: 439 - protein, 722 aa, synthetic construct; identical to SEQ ID NO: 194
  REGION 1..722: note = MX1153

SEQ ID NO: 440 - DNA, 2190 bp, synthetic construct
  misc_feature 1..2190: note = MX1152
  source 1..2190: mol_type = other DNA
cagaccgtggtcacacaagagcctagctttagcgtgtcccctggcggcacagtgacactgacatgtggactttctagcggatctgtgtccaccgcctactttcccagctggtatcaacagaccccaggccaggcacctcggacactgatctacggcaccaacacaagatccagcggcgtgcccgataggttcagcggatctatcctgggcaacaaggccgcactgactatcacaggcgcccaggccgatgacgagagcgattactactgcgtgctgtacatgggcagaggcatcgtggtttttggcggaggcaccaagctgacagtgcttggcggatcctctggagaaattgtgctgacccaatctccaggcactctgtctctgagccctggggagagagctaccctgtcttgtagagcctctcagtccgtgtcctccagctatctcgcctggtatcaacaaaagcctgggcaagcccctcggctgctcatctactctgctagctcaagagccaccggaattcccgacaggtttagcggaagcggctccggcacagacttcacactgaccatctctcggctggaacctgaagattttgccgtctatttttgtcagcagtatgtcgggctcacaggatggacctttggacagggcaccaaagtcgagatcaaaggaggtggtggctctggcggatctgggagtggtggcggaggctctgcttctggatctggacaaatgcagctcgttcagagcggccctgaagtgaagaaacctggcacctccgtgaaggtgtcctgcaaggccagcggcttcacctttacaagctctgccgtgcagtgggttcgacaagctagaggccagagactggaatggatcggctggatcgttgtcggcagcggcaacaccaattacgcccagaaattccaagagcgcgtgaccatcaccagagacatgagcaccagcacagcctacatggaactgagcagtctgcgcagcgaagataccgctgtgtactattgtgccgctcctaactgcagcaacgtcgtgtgctacgatggcttcgatatctggggacagggcacaatggtcaccgtgtcctctggaggcagctccgggcaggtccagcttgttgaaagtggcggaggggttgtgcaacccggaagatctctgagactgtcttgcgccgccagcggctttacactgtcctcttatggaatgcattgggttcgacaagctcccggcaagggactcgaatgggttgcagtgatttcctacgatggctccaacaagtattatgtcgactccgtgaaaggccggttcacaatctccagagacaactccaagaatacgctctatctccagatgaacagcctgcgggccgaagatacagccgtgtattactgcgctcgcggatgggcttactgggaactgctccctgattactattacggaatggacgtctggggacagggaacaaccgtgaccgttagctctgcttctggcggctccggagataagacccacacatgtcctccatgtcctgctccagaactgctcggcggcccttctgtgttcctgtttcctccaaagcctaaggacaccctgatgatcagcagaacccctgaagtgacctgcgtggtggtggatgtgtctcacgaggaccccgaagtgaagttcaattggtacgtggacggcgtggaagtgcacaacgccaagaccaagcctagagaggaacagtacaacagcacctacagagtggtgtccgtgctgaccgtgctgcaccaggattggctgaacggcaaagagtacaagtgcaaggtgtccaacaaggccctgcctgctcctatcgagaaaaccatcagcaaggccaagggccagcctagggaaccccaggtttacacccttcctccatgccgggatgagctgaccaagaaccaggtgtccctgtggtgtctcgtgaagggcttctaccccagcgacattgccgtggaatgggagagcaatggccagcctgagaacaactacaagacaacccctcctgtgctggacagcgacggctcattcttcctgtacagcaagctgacagtcgacaagtccagatggcagcagggcaacgtgttcagttgcagcgtgctgcacgaggccctgcacagtcactacacccagaagtccctgagcctgtctcctgga

SEQ ID NO: 441 - protein, 728 aa, synthetic construct
  REGION 1..728: note = MX1152
EIVLTQSPGTLSLSPGERATLSCRASQSVSSSYLAWYQQKPGQAPRLLIYSASSRATGIPDRFSGSGSGTDFTLTISRLEPEDFAVYFCQQYVGLTGWTFGQGTKVEIKGGSSGDTVMTQSPLSLPVTPGEPASISCRSSQSLLNSNGYNYLDWYVQKPGQSPQLLIYLGSNRASGVPDRFSGSGSGTDFTLKISRVEAEDVGVYYCMQPLQTPLFTFGPGTKVEIKGGGGSGGSGSGGGGSASGSGQVTLRESGPALVKPTQTLTLTCTFSGFSLSTRGVCVSWIRQPPGKALEWLAFIDWDDDKYYNTSLKTRLTISKDTSKNQVVLTMTNVHPVDTATYYCARISSHHGSSWCTTFDYWGQGALVTVSAGGSSGQMQLVQSGPEVKKPGTSVKVSCKASGFTFTSSAVQWVRQRQRLEWIGWIVVGSGNTNYAQKFQERVTITRDMSTSTAYMELSSLRSEDTAVYYCAAPNCSNVVCYDGFDIWGQGTMVTVSSASGGSGDKTHTCPPCPAPELLGGPSVFLFPPKPKDTLMISRTPEVTCVVVDVSHEDPEVKFNWYVDGVEVHNAKTKPREEQYNSYVVSVLTVLHQDWLNGKEYKCKVSNKALPAPIEKTISKAKGQPREPQVCTLPPSRDELTKNQVSLSCAVKGFYPSDIAVEWESNGQPENNYKTTPPVLDSDGSFFLVSKLTVDKSRWQQGNVFSCSVLHEALHSHYTQKSLSLSPG

SEQ ID NO: 442 - DNA, 2196 bp, synthetic construct
  misc_feature 1..2196: note = MX1152
  source 1..2196: mol_type = other DNA
gagatcgtgctgacacagagccctggcacactgtcactgtctccaggcgaaagagccacactgagctgtagagccagccagagcgtgtccagctcttacctggcttggtatcagcagaagcccggacaggctcccagactgctgatctactctgccagcagcagagccacaggcatccccgatagattttctggcagcggctccggcaccgacttcaccctgacaatcagcagactggaacccgaggacttcgccgtgtacttctgtcagcagtacgtgggcctgaccggctggacatttggccagggaacaaaggtggaaatcaagggcggatcctctggagacaccgtgatgacacagagccctctgagcctgcctgtgacacctggcgaacctgccagcatcagctgtagaagcagccagagcctgctgaacagcaacggctacaactacctggattggtacgtgcagaagcccggccagtctcctcagctgctgatctacctgggcagcaatagagccagcggcgtgcccgatagattttctggctctggcagcggcaccgacttcaccctgaagatctctagagtggaagccgaggacgtgggcgtgtactactgtatgcagcctctgcagacccctctgttcacatttggccctggcaccaaggtggaaatcaaaggaggtggtggctctggcggatctgggagtggtggcggaggctctgcttctggatctggacaagtgacactgagagagtctggccccgctctggtcaagcctacacagaccctgacactgacctgcaccttcagcggcttcagcctgtctactagaggcgtgtgcgtgtcctggatcagacagcctcctggaaaggccctggaatggctggccttcatcgactgggacgacgacaagtactacaacaccagcctgaaaacccggctgaccatcagcaaggacaccagcaagaaccaggtggtgctgaccatgaccaacgtgcaccctgtggataccgccacctactactgcgccagaatcagctctcaccacggctccagctggtgtaccaccttcgattattggggccagggcgctctcgtgacagtttctgctggaggcagctccgggcagatgcaactcgttcagagcggacctgaagtgaaaaagcccggcacatccgtgaaagtctcttgcaaagcctccggctttaccttcaccagcagcgctgtccagtgggttcgccaagcaagaggccagagactcgagtggattggatggatcgtcgttggctcaggcaataccaattatgcccaaaagtttcaagagagggtcacgatcacccgggatatgagcacctctacagcatatatggaactgtcaagcctgcgctccgaggatacagccgtgtattactgtgctgccccaaactgctccaatgtcgtgtgttatgatggatttgacatttggggacagggaacgatggttacagtgtccagcgcttctggcggctccggagataagacccacacatgtcctccatgtcctgctccagaactgctcggcggcccttctgtgttcctgtttcctccaaagcctaaggacaccctgatgatcagcagaacccctgaagtgacctgcgtggtggtggatgtgtctcacgaggaccccgaagtgaagttcaattggtacgtggacggcgtggaagtgcacaacgccaagaccaagcctagagaggaacagtacaacagcacctacagagtggtgtccgtgctgaccgtgctgcaccaggattggctgaacggcaaagagtacaagtgcaaggtgtccaacaaggccctgcctgctcctatcgagaaaaccatcagcaaggccaagggccagcctagggaaccccaggtttgtacccttcctccaagccgggatgagctgaccaagaaccaggtgtccctgagctgtgccgtgaagggcttctaccccagcgacattgccgtggaatgggagagcaatggccagcctgagaacaactacaagacaacccctcctgtgctggacagcgacggctcattcttcctggtgagcaagctgacagtcgacaagtccagatggcagcagggcaacgtgttcagttgcagcgtgctgcacgaggccctgcacagtcactacacccagaagtccctgagcctgtctcctgga

SEQ ID NO: 443 - protein, 722 aa, synthetic construct; identical to SEQ ID NO: 194
  REGION 1..722: note = MX1081

SEQ ID NO: 444 - DNA, 2190 bp, synthetic construct; identical to SEQ ID NO: 440
  misc_feature 1..2190: note = MX1081
  source 1..2190: mol_type = other DNA

SEQ ID NO: 445 - protein, 728 aa, synthetic construct; identical to SEQ ID NO: 343
  REGION 1..728: note = MX1081

SEQ ID NO: 446 - DNA, 2196 bp, synthetic construct; identical to SEQ ID NO: 344
  misc_feature 1..2196: note = MX1081
  source 1..2196: mol_type = other DNA

SEQ ID NO: 447 - protein, 722 aa, synthetic construct; identical to SEQ ID NO: 207
  REGION 1..722: note = MX1153

SEQ ID NO: 448 - DNA, 2190 bp, synthetic construct
  misc_feature 1..2190: note = MX1153
  source 1..2190: mol_type = other DNA
gagatcgtgctgacacagagccctggcacactgtcactgtctccaggcgaaagagccacactgagctgtagagccagccagagcgtgtccagctcttacctggcttggtatcagcagaagcccggacaggctcccagactgctgatctactctgccagcagcagagccacaggcatccccgatagattttctggcagcggctccggcaccgacttcaccctgacaatcagcagactggaacccgaggacttcgccgtgtacttctgtcagcagtacgtgggcctgaccggctggacatttggccagggaacaaaggtggaaatcaagggcggatcctctggacagaccgtggtcacacaagagcctagctttagcgtgtcccctggcggcacagtgacactgacatgtggactttctagcggatctgtgtccaccgcctactttcccagctggtatcaacagaccccaggccaggcacctcggacactgatctacggcaccaacacaagatccagcggcgtgcccgataggttcagcggatctatcctgggcaacaaggccgcactgactatcacaggcgcccaggccgatgacgagagcgattactactgcgtgctgtacatgggcagaggcatcgtggtttttggcggaggcaccaagctgacagtgcttggaggtggtggctctggcggatctgggagtggtggcggaggctctgcttctggatctggacaggtccagctggttgaatctggtggcggagttgtgcagcctggcagaagcctgagactgtcttgtgccgcctctggctttaccctgagcagctatggcatgcactgggtccgacaggcccctggcaaaggacttgaatgggtcgccgtgatcagctacgacggcagcaacaagtactacgtggacagcgtgaagggcagattcaccatcagccgggacaacagcaagaacaccctgtacctgcagatgaacagcctgagagccgaggacacagccgtgtattattgcgccagaggctgggcctattgggagctgctgcctgactactactacggcatggatgtgtggggccagggaaccacagtgaccgtgtctagcggaggcagctccgggcaaatgcagctcgttcagagcggccctgaagtgaagaaacctggcacctccgtgaaggtgtcctgcaaggccagcggcttcacctttacaagctctgccgtgcagtgggttcgacaagctagaggccagagactggaatggatcggctggatcgttgtcggcagcggcaacaccaattacgcccagaaattccaagagcgcgtgaccatcaccagagacatgagcaccagcacagcctacatggaactgagcagtctgcgcagcgaagataccgctgtgtactattgtgccgctcctaactgcagcaacgtcgtgtgctacgatggcttcgacatctggggacagggcacaatggtcaccgtgtcctctgcttctggcggctccggagataagacccacacatgtcctccatgtcctgctccagaactgctcggcggcccttctgtgttcctgtttcctccaaagcctaaggacaccctgatgatcagcagaacccctgaagtgacctgcgtggtggtggatgtgtctcacgaggaccccgaagtgaagttcaattggtacgtggacggcgtggaagtgcacaacgccaagaccaagcctagagaggaacagtacaacagcacctacagagtggtgtccgtgctgaccgtgctgcaccaggattggctgaacggcaaagagtacaagtgcaaggtgtccaacaaggccctgcctgctcctatcgagaaaaccatcagcaaggccaagggccagcctagggaaccccaggtttacacccttcctccatgccgggatgagctgaccaagaaccaggtgtccctgtggtgtctcgtgaagggcttctaccccagcgacattgccgtggaatgggagagcaatggccagcctgagaacaactacaagacaacccctcctgtgctggacagcgacggctcattcttcctgtacagcaagctgacagtcgacaagtccagatggcagcagggcaacgtgttcagttgcagcgtgctgcacgaggccctgcacagtcactacacccagaagtccctgagcctgtctcctgga

SEQ ID NO: 449 - protein, 728 aa, synthetic construct; identical to SEQ ID NO: 441
  REGION 1..728: note = MX1153

SEQ ID NO: 450 - DNA, 2196 bp, synthetic construct; identical to SEQ ID NO: 442
  misc_feature 1..2196: note = MX1153
  source 1..2196: mol_type = other DNA

SEQ ID NO: 451 - protein, 722 aa, synthetic construct; identical to SEQ ID NO: 207
  REGION 1..722: note = MX1154

SEQ ID NO: 452 - DNA, 2190 bp, synthetic construct; identical to SEQ ID NO: 448
  misc_feature 1..2190: note = MX1154
  source 1..2190: mol_type = other DNA

SEQ ID NO: 453 - protein, 728 aa, synthetic construct; identical to SEQ ID NO: 343
  REGION 1..728: note = MX1154

SEQ ID NO: 454 - DNA, 2196 bp, synthetic construct; identical to SEQ ID NO: 344
  misc_feature 1..2196: note = MX1154
  source 1..2196: mol_type = other DNA

SEQ ID NO: 455 - protein, 722 aa, synthetic construct; identical to SEQ ID NO: 194
  REGION 1..722: note = MX1155

SEQ ID NO: 456 - DNA, 2190 bp, synthetic construct; identical to SEQ ID NO: 440
  misc_feature 1..2190: note = MX1155
  source 1..2190: mol_type = other DNA

SEQ ID NO: 457 - protein, 732 aa, synthetic construct; identical to SEQ ID NO: 363
  REGION 1..732: note = MX1155

SEQ ID NO: 458 - DNA, 2208 bp, synthetic construct; identical to SEQ ID NO: 364
  misc_feature 1..2208: note = MX1155
  source 1..2208: mol_type = other DNA

SEQ ID NO: 459 - protein, 722 aa, synthetic construct; identical to SEQ ID NO: 194
  REGION 1..722: note = MX1082

SEQ ID NO: 460 - DNA, 2190 bp, synthetic construct; identical to SEQ ID NO: 440
  misc_feature 1..2190: note = MX1082
  source 1..2190: mol_type = other DNA

SEQ ID NO: 461 - protein, 732 aa, synthetic construct; identical to SEQ ID NO: 367
  REGION 1..732: note = MX1082

SEQ ID NO: 462 - DNA, 2208 bp, synthetic construct; identical to SEQ ID NO: 368
  misc_feature 1..2208: note = MX1156
  source 1..2208: mol_type = other DNA

SEQ ID NO: 463 - protein, 722 aa, synthetic construct; identical to SEQ ID NO: 207
  REGION 1..722: note = MX1156

SEQ ID NO: 464 - DNA, 2190 bp, synthetic construct; identical to SEQ ID NO: 448
  misc_feature 1..2190: note = Linker
  source 1..2190: mol_type = other DNA

SEQ ID NO: 465 - protein, 732 aa, synthetic construct; identical to SEQ ID NO: 363
  REGION 1..732: note = MX1156

SEQ ID NO: 466 - DNA, 2208 bp, synthetic construct; identical to SEQ ID NO: 364
  misc_feature 1..2208: note = MX1156
  source 1..2208: mol_type = other DNA

SEQ ID NO: 467 - protein, 722 aa, synthetic construct; identical to SEQ ID NO: 207
  REGION 1..722: note = MX1157

SEQ ID NO: 468 - DNA, 2190 bp, synthetic construct; identical to SEQ ID NO: 448
  misc_feature 1..2190: note = MX1157
  source 1..2190: mol_type = other DNA

SEQ ID NO: 469 - protein, 732 aa, synthetic construct; identical to SEQ ID NO: 367
  REGION 1..732: note = MX1157

SEQ ID NO: 470 - DNA, 2208 bp, synthetic construct; identical to SEQ ID NO: 368
  misc_feature 1..2208: note = MX1157
  source 1..2208: mol_type = other DNA

SEQ ID NO: 471 - protein, 726 aa, synthetic construct; identical to SEQ ID NO: 341
  REGION 1..726: note = MX1083

SEQ ID NO: 472 - DNA, 2196 bp, synthetic construct; identical to SEQ ID NO: 342
  misc_feature 1..2196: note = MX1083
  source 1..2196: mol_type = other DNA

SEQ ID NO: 473 - protein, 732 aa, synthetic construct; identical to SEQ ID NO: 367
  REGION 1..732: note = MX1083

SEQ ID NO: 474 - DNA, 2208 bp, synthetic construct; identical to SEQ ID NO: 368
  misc_feature 1..2208: note = MX1083
  source 1..2208: mol_type = other DNA

SEQ ID NO: 475 - protein, 726 aa, synthetic construct
  REGION 1..726: note = MX1084
DTVMTQSPLSLPVTPGEPASISCRSSQSLLNSNGYNYLDWYVQKPGQSPQLLIYLGSNRASGVPDRFSGSGSGTDFTLKISRVEAEDVGVYYCMQPLQTPLFTFGPGTKVEIKGGSSGEIVLTQSPGTLSLSPGERATLSCRASQSVSSSYLAWYQQKPGQAPRLLIYSASSRATGIPDRFSGSGSGTDFTLTISRLEPEDFAVYFCQQYVGLTGWTFGQGTKVEIKGGGGSGGSGSGGGGSASGSGQMQLVQSGPEVKKPGTSVKVSCKASGFTFTSSAVQWVRQRQRLEWIGWIVVGSGNTNYAQKFQERVTITRDMSTSTAYMELSSLRSEDTAVYYCAAPNCSNVVCYDGFDIWGQGTMVTVSSGGSSGQVTLRESGPALVKPTQTLTLTCTFSGFSLSTRGVCVSWIRQPPGKALEWLAFIDWDDDKYYNTSLKTRLTISKDTSKNQVVLTMTNVHPVDTATYYCARISSHHGSSWCTTFDYWGQGALVTVSAASGGSGDKTHTCPPCPAPELLGGPSVFLFPPKPKDTLMISRTPEVTCVVVDVSHEDPEVKFNWYVDGVEVHNAKTKPREEQYNSYVVSVLTVLHQDWLNGKEYKCKVSNKALPAPIEKTISKAKGQPREPQVYTLPPCRDELTKNQVSLWCLVKGFYPSDIAVEWESNGQPENNYKTTPPVLDSDGSFFKKLTVDKSRWQQGNVFSCSVLHEALHSHYTQKSLSLSPG

SEQ ID NO: 476 - DNA, 2196 bp, synthetic construct
  misc_feature 1..2196: note = MX1084
  source 1..2196: mol_type = other DNA
gacaccgtgatgacacagagccctctgagcctgcctgtgacacctggcgaacctgccagcatcagctgtagaagcagccagagcctgctgaacagcaacggctacaactacctggattggtacgtgcagaagcccggccagtctcctcagctgctgatctacctgggcagcaatagagccagcggcgtgcccgatagattttctggctctggcagcggcaccgacttcaccctgaagatctctagagtggaagccgaggacgtgggcgtgtactactgtatgcagcctctgcagacccctctgttcacatttggccctggcaccaaggtggaaatcaaaggcggatcctctggagaaattgtgctgacccaatctccaggcactctgtctctgagccctggggagagagctaccctgtcttgtagagcctctcagtccgtgtcctccagctatctcgcctggtatcaacaaaagcctgggcaagcccctcggctgctcatctactctgctagctcaagagccaccggaattcccgacaggtttagcggaagcggctccggcacagacttcacactgaccatctctcggctggaacctgaagattttgccgtctatttttgtcagcagtatgtcgggctcacaggatggacctttggacagggcaccaaagtcgagatcaaaggaggtggtggctctggcggatctgggagtggtggcggaggctctgcttctggatctggacaaatgcagctcgttcagagcggccctgaagtgaagaaacctggcacctccgtgaaggtgtcctgcaaggccagcggcttcacctttacaagctctgccgtgcagtgggttcgacaagctagaggccagagactggaatggatcggctggatcgttgtcggcagcggcaacaccaattacgcccagaaattccaagagcgcgtgaccatcaccagagacatgagcaccagcacagcctacatggaactgagcagtctgcgcagcgaagataccgctgtgtactattgtgccgctcctaactgcagcaacgtcgtgtgctacgatggcttcgacatctggggacagggcacaatggtcaccgtgtcctctggaggcagctccgggcaagtgacactgagagagtctggccccgctctggtcaagcctacacagaccctgacactgacctgcaccttcagcggcttcagcctgtctactagaggcgtgtgcgtgtcctggatcagacagcctcctggaaaggccctggaatggctggccttcatcgactgggacgacgacaagtactacaacaccagcctgaaaacccggctgaccatcagcaaggacaccagcaagaaccaggtggtgctgaccatgaccaacgtgcaccctgtggataccgccacctactactgcgccagaatcagctctcaccacggctccagctggtgtaccaccttcgattattggggccagggcgctctcgtgacagtttctgctgcttctggcggctccggagataagacccacacatgtcctccatgtcctgctccagaactgctcggcggcccttctgtgttcctgtttcctccaaagcctaaggacaccctgatgatcagcagaacccctgaagtgacctgcgtggtggtggatgtgtctcacgaggaccccgaagtgaagttcaattggtacgtggacggcgtggaagtgcacaacgccaagaccaagcctagagaggaacagtacaacagcacctacagagtggtgtccgtgctgaccgtgctgcaccaggattggctgaacggcaaagagtacaagtgcaaggtgtccaacaaggccctgcctgctcctatcgagaaaaccatcagcaaggccaagggccagcctagggaaccccaggtttacacccttcctccatgccgggatgagctgaccaagaaccaggtgtccctgtggtgtctcgtgaagggcttctaccccagcgacattgccgtggaatgggagagcaatggccagcctgagaacaactacaagacaacccctcctgtgctggacagcgacggctcattcttcctgtacagcaagctgacagtcgacaagtccagatggcagcagggcaacgtgttcagttgcagcgtgctgcacgaggccctgcacagtcactacacccagaagtccctgagcctgtctcctgga

SEQ ID NO: 477 - protein, 732 aa, synthetic construct; identical to SEQ ID NO: 367
  REGION 1..732: note = MX1084

SEQ ID NO: 478 - DNA, 2208 bp, synthetic construct; identical to SEQ ID NO: 368
  misc_feature 1..2208: note = MX1084
  source 1..2208: mol_type = other DNA

SEQ ID NO: 479 - protein, 730 aa, synthetic construct; identical to SEQ ID NO: 385
  REGION 1..730: note = MX1158

SEQ ID NO: 480 - DNA, 2208 bp, synthetic construct; identical to SEQ ID NO: 386
  misc_feature 1..2208: note = MX1158
  source 1..2208: mol_type = other DNA

SEQ ID NO: 481 - protein, 728 aa, synthetic construct; identical to SEQ ID NO: 441
  REGION 1..728: note = MX1158

SEQ ID NO: 482 - DNA, 2196 bp, synthetic construct; identical to SEQ ID NO: 442
  misc_feature 1..2196: note = MX1158
  source 1..2196: mol_type = other DNA

SEQ ID NO: 483 - protein, 730 aa, synthetic construct; identical to SEQ ID NO: 385
  REGION 1..730: note = MX1085

SEQ ID NO: 484 - DNA, 2208 bp, synthetic construct; identical to SEQ ID NO: 386
  misc_feature 1..2208: note = MX1085
  source 1..2208: mol_type = other DNA

SEQ ID NO: 485 - protein, 728 aa, synthetic construct; identical to SEQ ID NO: 343
  REGION 1..728: note = MX1085

SEQ ID NO: 486 - DNA, 2196 bp, synthetic construct; identical to SEQ ID NO: 344
  misc_feature 1..2196: note = MX1085
  source 1..2196: mol_type = other DNA

SEQ ID NO: 487 - protein, 724 aa, synthetic construct; identical to SEQ ID NO: 347
  REGION 1..724: note = MX1086

SEQ ID NO: 488 - DNA, 2178 bp, synthetic construct; identical to SEQ ID NO: 348
  misc_feature 1..2178: note = MX1086
  source 1..2178: mol_type = other DNA

SEQ ID NO: 489 - protein, 718 aa, synthetic construct; identical to SEQ ID NO: 257
  REGION 1..718: note = MX1086

SEQ ID NO: 490 - DNA, 2172 bp, synthetic construct; identical to SEQ ID NO: 396
  misc_feature 1..2172: note = MX1086
  source 1..2172: mol_type = other DNA

SEQ ID NO: 491 - protein, 722 aa, synthetic construct; identical to SEQ ID NO: 194
  REGION 1..722: note = MX1088

SEQ ID NO: 492 - DNA, 2190 bp, synthetic construct; identical to SEQ ID NO: 440
  misc_feature 1..2190: note = MX1088
  source 1..2190: mol_type = other DNA

SEQ ID NO: 493 - protein, 724 aa, synthetic construct; identical to SEQ ID NO: 313
  REGION 1..724: note = MX1088

SEQ ID NO: 494 - DNA, 2178 bp, synthetic construct; identical to SEQ ID NO: 314
  misc_feature 1..2178: note = MX1088
  source 1..2178: mol_type = other DNA

SEQ ID NO: 495 - protein, 718 aa, synthetic construct; identical to SEQ ID NO: 345
  REGION 1..718: note = MX1087

SEQ ID NO: 496 - DNA, 2172 bp, synthetic construct; identical to SEQ ID NO: 346
  misc_feature 1..2172: note = MX1087
  source 1..2172: mol_type = other DNA

SEQ ID NO: 497 - protein, 724 aa, synthetic construct; identical to SEQ ID NO: 258
  REGION 1..724: note = MX1087

SEQ ID NO: 498 - DNA, 2178 bp, synthetic construct; identical to SEQ ID NO: 394
  misc_feature 1..2178: note = MX1089
  source 1..2178: mol_type = other DNA

SEQ ID NO: 499 - protein, 718 aa, synthetic construct; identical to SEQ ID NO: 345
  REGION 1..718: note = MX1089

SEQ ID NO: 500 - DNA, 2172 bp, synthetic construct; identical to SEQ ID NO: 346
  misc_feature 1..2172: note = MX1089
  source 1..2172: mol_type = other DNA

SEQ ID NO: 501 - protein, 728 aa, synthetic construct; identical to SEQ ID NO: 343
  REGION 1..728: note = MX1089

SEQ ID NO: 502 - DNA, 2196 bp, synthetic construct; identical to SEQ ID NO: 344
  misc_feature 1..2196: note = MX1089
  source 1..2196: mol_type = other DNA

SEQ ID NO: 503 - protein, 718 aa, synthetic construct; identical to SEQ ID NO: 257
  REGION 1..718: note = MX1206

SEQ ID NO: 504 - DNA, 2172 bp, synthetic construct; identical to SEQ ID NO: 396
  misc_feature 1..2172: note = MX1206
  source 1..2172: mol_type = other DNA

SEQ ID NO: 505 - protein, 728 aa, synthetic construct; identical to SEQ ID NO: 343
  REGION 1..728: note = MX1206

SEQ ID NO: 506 - DNA, 2196 bp, synthetic construct; identical to SEQ ID NO: 344
  misc_feature 1..2196: note = MX1206
  source 1..2196: mol_type = other DNA

SEQ ID NO: 507 - DNA, 2178 bp, synthetic construct; identical to SEQ ID NO: 318
  misc_feature 1..2178: note = MX1042
  source 1..2178: mol_type = other DNA

SEQ ID NO: 508 - protein, 109 aa, synthetic construct
  REGION 1..109: note = 58.1LC_94GLTG - VL
EIVLTQSPGTLSLSPGERATLSCRASQSVSSSYLAWYQQKPGQAPRLLIYSASSRATGIPDRFSGSGSGTDFTLTISRLEPEDFAVYFCQQYGGLTGWTFGQGTKVEIK

SEQ ID NO: 509 - protein, 109 aa, synthetic construct
  REGION 1..109: note = S2E12LC - VL
DIVLTQTPGTLSLSPGERATLSCRASQSVSSSYLAWYQQKPGQAPRLLIYGASSRATGIPDRFSGSGSGTDFTLTISRLEPEDFAVYYCQQYVGLTGWTFGQGTKVEIK

SEQ ID NO: 510 - protein, 121 aa, synthetic construct
  REGION 1..121: note = A23-58.1HC_Y100cA - VH
QMQLVQSGPEVKKPGTSVKVSCKASGFTFTSSAVQWVRQRQRLEWIGWIVVGSGNTNYAQKFQERVTITRDMSTSTAYMELSSLRSEDTAVYYCAAPNCSNVVCADGFDIWGQGTMVTVSS

SEQ ID NO: 511 - protein, 109 aa, synthetic construct
  REGION 1..109: note = 182.1LC_94GLTG - VL
EIVLTQSPGTLSLSPGERATLSCRASQSVSSSYLAWYQQKPGQAPRLLIYGASSRATGFPDRFSGSGSGTDFTLTISRLEPEDFAVYYCQQYGGLTGWTFGQGTKVEIR

SEQ ID NO: 512 - protein, 123 aa, synthetic construct
  REGION 1..123: note = A23-105.1 - VH
QVQLVESGGGVVQPGRSLRLSCAASGFTFSNYAIHWVRQAPGKGLEWVAVISYDGSNKYYADSVKGRFTISRDNSKNTLYLEMNSLRAEDMAVYYCARVGPYQYDSSAAFDIWGQGTMVTVSS

SEQ ID NO: 513 - protein, 8 aa, synthetic construct
  REGION 1..8: note = A23-105.1   HCDR1
GFTFSNYA

SEQ ID NO: 514 - protein, 8 aa, synthetic construct
  REGION 1..8: note = A23-105.1   HCDR2
ISYDGSNK

SEQ ID NO: 515 - protein, 16 aa, synthetic construct
  REGION 1..16: note = A23-105.1   HCDR3
CARVGPYQYDSSAAFD

SEQ ID NO: 516 - protein, 107 aa, synthetic construct
  REGION 1..107: note = A23-105.1   VL
DIQMTQSPSTLSASVGDRVTITCRASQSISSWLAWYQQKPGQAPKLLIYDASSLESGVPSRFSGSGSGTEFTLTISSLQPDDFATYYCQQYNSYSRTFGQGTKVEIK

SEQ ID NO: 517 - protein, 6 aa, synthetic construct
  REGION 1..6: note = A23-105.1   LCDR1
QSISSW

SEQ ID NO: 518 - skipped

SEQ ID NO: 519 - protein, 11 aa, synthetic construct [sequence omitted]

SEQ ID NO: 520 - protein, 120 aa, synthetic construct
  REGION 1..120: note = A19-1.1   VH
QVQLVESGGGVVQPGRSLRLSCAASGFTFTNYAMHWVRQAPGKGLEWVAVISNDGSDKYYADSVKGRFTISRDNSKSTVYLQMSSLRPEDTAVYFCARDPPQVHWSLDYWGQGTLVTVSS

SEQ ID NO: 521 - protein, 8 aa, synthetic construct
  REGION 1..8: note = A19.1.1   HCDR1
GFTFTNYA

SEQ ID NO: 522 - protein, 8 aa, synthetic construct
  REGION 1..8: note = A19.1.1   HCDR2
ISNDGSDK

SEQ ID NO: 523 - protein, 15 aa, synthetic construct
  REGION 1..15: note = A19.1.1   HCDR3
CARDPPQVHWSLDYW

SEQ ID NO: 524 - protein, 110 aa, synthetic construct
  REGION 1..110: note = A19-1.1   VL
QSALTQPPSASGSPGQSVTISCTGTSSDVGDYNYVSWYQHHPGKAPKLIIYDVSKRPSGVPDRFSGSKSGDTASLTVSGLQAEDEADYYCSSYAGNNNAVFGTGTKVTVL

SEQ ID NO: 525 - protein, 9 aa, synthetic construct
  REGION 1..9: note = A19.1.1   LCDR1
SSDVGDYNY

SEQ ID NO: 526 - skipped

SEQ ID NO: 527 - protein, 12 aa, synthetic construct
  REGION 1..12: note = A19.1.1   LCDR3
CSSYAGNNNAVF

SEQ ID NO: 528 - protein, 122 aa, synthetic construct
  REGION 1..122: note = A19-30.1   VH
QVQLVESGGGVVQPGRSLRLSCAASGFTFSNYGMHWVRQAPGKGLEWLAVISYDGSNKYYADSVKGRFTISRDNSKNTLFLQMNSLRAEDTAVYYCAKESQFGELFEALDYWGQGTLVTVSS

SEQ ID NO: 529 - protein, 8 aa, synthetic construct
  REGION 1..8: note = A19-30.1   HCDR1
GFTFSNYG

SEQ ID NO: 530 - protein, 8 aa, synthetic construct
  REGION 1..8: note = A19-30.1   HCDR2
ISYDGSNK

SEQ ID NO: 531 - protein, 16 aa, synthetic construct
  REGION 1..16: note = A19-30.1   HCDR3
CAKESQFGELFEALDY

SEQ ID NO: 532 - protein, 108 aa, synthetic construct
  REGION 1..108: note = A19-30.1   VL
SYELTQPPSVSVSPGQTARITCSGDALPRKYAFWYQQKSGQAPVLVISEDSKRPSGIPERFSGSSSGTMATLTISGAQVEDEADYYCYSTDSSGNHRVFGGGTKLTVL

SEQ ID NO: 533 - protein, 6 aa, synthetic construct
  REGION 1..6: note = A19-30.1   LCDR1
ALPRKY

SEQ ID NO: 534 - skipped

SEQ ID NO: 535 - protein, 13 aa, synthetic construct [sequence omitted]

SEQ ID NO: 536 - protein, 123 aa, synthetic construct
  REGION 1..123: note = A20-36.1   VH
QVQLVESGGGVVQPGRSLRLSCAASGFIFSSYGVHWVRQAPGKGLEWVAVIWHDESNKDYADSVKGRFTISRDNSKNTVYLQMNSLRAEDTAMYYCARDGYDFLTGAYELDYWGQGTLVTVSS

SEQ ID NO: 537 - protein, 8 aa, synthetic construct
  REGION 1..8: note = A20-36.1   HCDR1
GFIFSSYG

SEQ ID NO: 538 - protein, 8 aa, synthetic construct
  REGION 1..8: note = A20-36.1   HCDR2
IWHDESNK

SEQ ID NO: 539 - protein, 18 aa, synthetic construct
  REGION 1..18: note = A20-36.1   HCDR3
CARDGYDFLTGAYELDYW

SEQ ID NO: 540 - protein, 107 aa, synthetic construct
  REGION 1..107: note = A20-36.1   VL
SYELTQPPSVSVSPGQTARITCSGDALPKQYAYWYQQKPGQAPVVVIYKDSERPSGIPERFSGSSSGTTVTLTISGVQAEDEADYYCQSADSSGTWVFGGGTKLTVL

SEQ ID NO: 541 - protein, 6 aa, synthetic construct
  REGION 1..6: note = A20-36.1   LCDR1
ALPKQY

SEQ ID NO: 542 - skipped

SEQ ID NO: 543 - protein, 12 aa, synthetic construct [sequence omitted]

SEQ ID NO: 544 - protein, 122 aa, synthetic construct
  REGION 1..122: note = A23-97.1 - VH
QVQLVESGGGVVQPGGSLRLSCAASGFTFSSFGMHWVRQAPGKGLEWVAFIRYDGSNKYYADSVKGRFTISRDNSKNTLYLQMNSLRAEDTAVYYCAKTELYYYDSSGPLGWGQGTLVTVSS

SEQ ID NO: 545 - protein, 8 aa, synthetic construct
  REGION 1..8: note = A23-97.1   HCDR1
GFTFSSFG

SEQ ID NO: 546 - protein, 8 aa, synthetic construct
  REGION 1..8: note = A23-97.1   HCDR2
IRYDGSNK

SEQ ID NO: 547 - protein, 17 aa, synthetic construct
  REGION 1..17: note = A23-97.1   HCDR3
CAKTELYYYDSSGPLGW

SEQ ID NO: 548 - protein, 107 aa, synthetic construct
  REGION 1..107: note = A23-97.1   VL
DIQMTQSPSTLSASVGDRVTITCRASQSITSWLAWYQQKPGKAPKLLIYDASSLESGVPSRFSGSGSGTEFTLTISSLQPDDFATYYCQQYNSYPWTFGQGTKVEIK

SEQ ID NO: 549 - protein, 6 aa, synthetic construct
  REGION 1..6: note = A23-97.1   LCDR1
QSITSW

SEQ ID NO: 550 - skipped

SEQ ID NO: 551 - protein, 11 aa, synthetic construct
  REGION 1..11: note = A23-97.1   LCDR3
CQQYNSYPWTF

SEQ ID NO: 552 - protein, 120 aa, synthetic construct
  REGION 1..120: note = A23-113.1   VH
QVHLEESGGAVVQPGRSLRLSCAASGFTFSSYGMHWVRQAPGKGLEWVAVISHDGSYKYYADSVKGRFTISRDNSKDTLYLQTNSLRAEDTAMYYCAKSYGYWMAYFDYWGQGTLVTVSS

SEQ ID NO: 553 - protein, 8 aa, synthetic construct
  REGION 1..8: note = A23-113.1   HCDR1
GFTFSSYG

SEQ ID NO: 554 - protein, 8 aa, synthetic construct
  REGION 1..8: note = A23-113.1   HCDR2
ISHDGSYK

SEQ ID NO: 555 - protein, 15 aa, synthetic construct
  REGION 1..15: note = A23-113.1   HCDR3
CAKSYGYWMAYFDYW

SEQ ID NO: 556 - protein, 107 aa, synthetic construct
  REGION 1..107: note = A23-113.1   VL
DIQMTQSPSSLSASVGDRVTITCRASQDISNYLAWYQQKPGKVPKLLIYAASTLQSGVPSRFSGSGSGTDFTLTISSLQPEDVATYYCQKYNSPWHTFGGGTKVEIK

SEQ ID NO: 557 - protein, 6 aa, synthetic construct
  REGION 1..6: note = A23-113.1   LCDR1
QDISNY

SEQ ID NO: 558 - skipped

SEQ ID NO: 559 - protein, 11 aa, synthetic construct
  REGION 1..11: note = A23-113.1   LCDR3
CQKYNSPWHTF

SEQ ID NO: 560 - protein, 125 aa, synthetic construct
  REGION 1..125: note = A23-80.1   VH
QVQLVQSGAEVKKPGASVKVSCKASGYTFTSNGVTWVRQAPGQGLEWMGWISTYNGDTNYAQKLQGRVSMTTDTSTRTVYMELRSLRSDDTAVYYCARVGDAYCSGGSCYHFDYWGQGTLVTVSS

SEQ ID NO: 561 - protein, 8 aa, synthetic construct
  REGION 1..8: note = A23-80.1   HCDR1
GYTFTSNG

SEQ ID NO: 562 - protein, 8 aa, synthetic construct
  REGION 1..8: note = A23-80.1   HCDR2
ISTYNGDT

SEQ ID NO: 563 - protein, 20 aa, synthetic construct
  REGION 1..20: note = A23-80.1   HCDR3
CARVGDAYCSGGSCYHFDYW

SEQ ID NO: 564 - protein, 109 aa, synthetic construct
  REGION 1..109: note = A23-80.1   VL
EIVMTQSPATLSVSPGERATLSCRASQSVSTNLAWYQQKPGQAPRLLIYGASTRATGIPARFSGSGSGTEFTLTISSLQSEDFALYYCQQYDNWPPEFTFGPGTKVDIK

SEQ ID NO: 565 - protein, 6 aa, synthetic construct
  REGION 1..6: note = A23-80.1   LCDR1
QSVSTN

SEQ ID NO: 566 - skipped

SEQ ID NO: 567 - protein, 13 aa, synthetic construct
  REGION 1..13: note = A23-80.1   LCDR3
CQQYDNWPPEFTF

SEQ ID NO: 568 - protein, 122 aa, synthetic construct
  REGION 1..122: note = A19-82.1 - VH
QVQLVESGGGVVQPGRSLRLSCVVSGLIFSTYDMHWVRQAPGKGLEWVAVISYDGSYKHYADSVKGRFTISRDSSKNTLYLQMNSLRPEDTAVYYCAKGEGVVAGTGKFDYWGQGTLVTVSS

SEQ ID NO: 569 - protein, 8 aa, synthetic construct
  REGION 1..8: note = A19-82.1   HCDR1
GLIFSTYD

SEQ ID NO: 570 - protein, 8 aa, synthetic construct
  REGION 1..8: note = A19-82.1   HCDR2
ISYDGSYK

SEQ ID NO: 571 - protein, 17 aa, synthetic construct
  REGION 1..17: note = A19-82.1   HCDR3
CAKGEGVVAGTGKFDYW

SEQ ID NO: 572 - protein, 108 aa, synthetic construct
  REGION 1..108: note = A19-82.1   VL
SYVLTQPPSVSVAPGQTARITCGGNNIGSKSVHWYQQKPGQAPVLVVYDDSDRPSGIPERFSGSNSGNTATLTISRVEAGDEADYYCQVWDGSGDPWVFGGGTKLTVL

SEQ ID NO: 573 - protein, 6 aa, synthetic construct
  REGION 1..6: note = A19-82.1   LCDR1
NIGSKS

SEQ ID NO: 574 - skipped

SEQ ID NO: 575 - protein, 13 aa, synthetic construct
  REGION 1..13: note = A19-82.1   LCDR3
CQVWDGSGDPWVF

SEQ ID NO: 576 - protein, 123 aa, synthetic construct
  REGION 1..123: note = A20-9.1   VH
QVQLVESGGGVVQPGRSLRLSCAASGFTFSSYGMHWVRQAPGKGLEWVAFISYDGSNKYYADSVKGRFTISRDNSKNTLYLQMNSLRAEDTAVYYCAKDYWSVAAGTSWFDPWGQGTLVSVSS

SEQ ID NO: 577 - protein, 8 aa, synthetic construct
  REGION 1..8: note = A20-9.1   HCDR1
GFTFSSYG

SEQ ID NO: 578 - protein, 8 aa, synthetic construct
  REGION 1..8: note = A20-9.1   HCDR2
ISYDGSNK

SEQ ID NO: 579 - protein, 18 aa, synthetic construct
  REGION 1..18: note = A20-9.1   HCDR3
CAKDYWSVAAGTSWFDPW

SEQ ID NO: 580 - protein, 107 aa, synthetic construct; identical to SEQ ID NO: 540
  REGION 1..107: note = A20-9.1   VL

SEQ ID NO: 581 - protein, 107 aa, synthetic construct; identical to SEQ ID NO: 540
  REGION 1..107: note = A20-9.1   LCDR1

SEQ ID NO: 582 - skipped

SEQ ID NO: 583 - protein, 12 aa, synthetic construct [sequence omitted]

SEQ ID NO: 584 - protein, 121 aa, synthetic construct; identical to SEQ ID NO: 74
  REGION 1..121: note = A23-58.1HC/58.1LC_93VGLTG   Antibody 45   VH

SEQ ID NO: 585 - protein, 8 aa, synthetic construct
  REGION 1..8: note = A23-58.1HC/58.1LC_93VGLTG   Antibody 45   HCDR1
GFTFTSSA

SEQ ID NO: 586 - protein, 8 aa, synthetic construct
  REGION 1..8: note = A23-58.1HC/58.1LC_93VGLTG   Antibody 45   HCDR2
IVVGSGNT

SEQ ID NO: 587 - protein, 18 aa, synthetic construct
  REGION 1..18: note = A23-58.1HC/58.1LC_93VGLTG   Antibody 45   HCDR3
CAAPNCSNVVCYDGFDIW

SEQ ID NO: 588 - protein, 109 aa, synthetic construct; identical to SEQ ID NO: 174
  REGION 1..109: note = A23-58.1HC/58.1LC_93VGLTG   Antibody 45   VL

SEQ ID NO: 589 - protein, 7 aa, synthetic construct
  REGION 1..7: note = A23-58.1HC/58.1LC_93VGLTG   Antibody 45   LCDR1
QSVSSSY

SEQ ID NO: 590 - skipped

SEQ ID NO: 591 - protein, 12 aa, synthetic construct
  REGION 1..12: note = A23-58.1HC/58.1LC_93VGLTG   Antibody 45   LCDR3
CQQYVGLTGWTF

SEQ ID NO: 592 - protein, 121 aa, synthetic construct; identical to SEQ ID NO: 74
  REGION 1..121: note = A23-58.1HC/58.1LC_94GLTG   Antibody 44 - VH

SEQ ID NO: 593 - protein, 8 aa, synthetic construct
  REGION 1..8: note = A23-58.1HC/58.1LC_94GLTG   Antibody 44   HCDR1
GFTFTSSA

SEQ ID NO: 594 - protein, 8 aa, synthetic construct
  REGION 1..8: note = A23-58.1HC/58.1LC_94GLTG   Antibody 44   HCDR2
IVVGSGNT

SEQ ID NO: 595 - protein, 18 aa, synthetic construct
  REGION 1..18: note = A23-58.1HC/58.1LC_94GLTG   Antibody 44   HCDR3
CAAPNCSNVVCYDGFDIW

SEQ ID NO: 596 - protein, 109 aa, synthetic construct; identical to SEQ ID NO: 508
  REGION 1..109: note = A23-58.1HC/58.1LC_94GLTG   Antibody 44   VL

SEQ ID NO: 597 - protein, 7 aa, synthetic construct
  REGION 1..7: note = A23-58.1HC/58.1LC_94GLTG   Antibody 44   LCDR1
QSVSSSY

SEQ ID NO: 598 - skipped

SEQ ID NO: 599 - protein, 12 aa, synthetic construct
  REGION 1..12: note = A23-58.1HC/58.1LC_94GLTG   Antibody 44   LCDR3
CQQYGGLTGWTF

SEQ ID NO: 600 - protein, 121 aa, synthetic construct; identical to SEQ ID NO: 74
  REGION 1..121: note = A23-58.1HC/S2E12LC   Antibody 56 - VH

SEQ ID NO: 601 - protein, 8 aa, synthetic construct
  REGION 1..8: note = A23-58.1HC/S2E12LC   Antibody 56   HCDR1
GFTFTSSA

SEQ ID NO: 602 - protein, 8 aa, synthetic construct
  REGION 1..8: note = A23-58.1HC/S2E12LC   Antibody 56   HCDR2
IVVGSGNT

SEQ ID NO: 603 - protein, 18 aa, synthetic construct
  REGION 1..18: note = A23-58.1HC/S2E12LC   Antibody 56   HCDR3
CAAPNCSNVVCYDGFDIW

SEQ ID NO: 604 - protein, 109 aa, synthetic construct; identical to SEQ ID NO: 509
  REGION 1..109: note = A23-58.1HC/S2E12LC   Antibody 56   VL

SEQ ID NO: 605 - protein, 7 aa, synthetic construct
  REGION 1..7: note = A23-58.1HC/S2E12LC   Antibody 56   LCDR1
QSVSSSY

SEQ ID NO: 606 - skipped

SEQ ID NO: 607 - protein, 12 aa, synthetic construct
  REGION 1..12: note = A23-58.1HC/S2E12LC   Antibody 56   LCDR3
CQQYVGLTGWTF

SEQ ID NO: 608 - protein, 121 aa, synthetic construct; identical to SEQ ID NO: 510
  REGION 1..121: note = A23-58.1HC_Y100cA/S2E12LC   Antibody 57 - VH

SEQ ID NO: 609 - protein, 8 aa, synthetic construct
  REGION 1..8: note = A23-58.1HC_Y100cA/S2E12LC   Antibody 57   HCDR1
GFTFTSSA

SEQ ID NO: 610 - protein, 8 aa, synthetic construct
  REGION 1..8: note = A23-58.1HC_Y100cA/S2E12LC   Antibody 57   HCDR2
IVVGSGNT

SEQ ID NO: 611 - protein, 18 aa, synthetic construct
  REGION 1..18: note = A23-58.1HC_Y100cA/S2E12LC   Antibody 57   HCDR3
CAAPNCSNVVCADGFDIW

SEQ ID NO: 612 - protein, 109 aa, synthetic construct; identical to SEQ ID NO: 509
  REGION 1..109: note = A23-58.1HC_Y100cA/S2E12LC   Antibody 57   VL

SEQ ID NO: 613 - protein, 7 aa, synthetic construct
  REGION 1..7: note = A23-58.1HC_Y100cA/S2E12LC   Antibody 57   LCDR1
QSVSSSY

SEQ ID NO: 614 - skipped

SEQ ID NO: 615 - protein, 12 aa, synthetic construct
  REGION 1..12: note = A23-58.1HC_Y100cA/S2E12LC   Antibody 57   LCDR3
CQQYVGLTGWTF

SEQ ID NO: 616 - protein, 121 aa, synthetic construct; identical to SEQ ID NO: 42
  REGION 1..121: note = B1-182.1HC/182.1LC_94GLTG   Antibody 27 - VH

SEQ ID NO: 617 - protein, 8 aa, synthetic construct
  REGION 1..8: note = B1-182.1HC/182.1LC_94GLTG   Antibody 27   HCDR1
GFTFTSSA

SEQ ID NO: 618 - protein, 8 aa, synthetic construct
  REGION 1..8: note = B1-182.1HC/182.1LC_94GLTG   Antibody 27   HCDR2
IVVGSGNT

SEQ ID NO: 619 - protein, 18 aa, synthetic construct
  REGION 1..18: note = B1-182.1HC/182.1LC_94GLTG   Antibody 27   HCDR3
CAAPYCSGGSCFDGFDIW

SEQ ID NO: 620 - protein, 109 aa, synthetic construct; identical to SEQ ID NO: 511
  REGION 1..109: note = B1-182.1HC/182.1LC_94GLTG   Antibody 27   VL

SEQ ID NO: 621 - protein, 7 aa, synthetic construct
  REGION 1..7: note = B1-182.1HC/182.1LC_94GLTG   Antibody 27   LCDR1
QSVSSSY

SEQ ID NO: 622 - skipped

SEQ ID NO: 623 - protein, 12 aa, synthetic construct
  REGION 1..12: note = B1-182.1HC/182.1LC_94GLTG   Antibody 27   LCDR3
CQQYGGLTGWTF

SEQ ID NO: 624 - protein, 118 aa, synthetic construct
  REGION 1..118: note = VH   SARS2.F768_pt2_G10 (G10)
EVQLVETGGGLIQPGGSLRLSCAASGVIVSRNYMSWVRQAPGKGLEWVSLMFAGGSAFYSDSVKGRFTISRDDSRNTLYLQMNSLRAEDTAVYYCARDLDVRGGLDVWGQGTTVTVSS

SEQ ID NO: 625 - protein, 105 aa, synthetic construct
  REGION 1..105: note = VL   SARS2.F768_pt2_G10 (G10)
DVQLTQFPSSLSASVGDRVTITCRASQDIPNYINWYQQKPGKAPRLLIYAASTLQSGVPSRFSGSGSGTDFTLTISSLQPEDFGTYYCQQSDTRTFGPGTKLEIK

SEQ ID NO: 626 - protein, 118 aa, synthetic construct
  REGION 1..118: note = VH - SARS2.F768_pt1_D11
EVQLVESGGGLVQPGGSLRLSCAASEIIVTRNYMTWVRQAPGKGLEWVSLIYPGGTTYYADSVKGRFTISRDNSKNTLYLQMNSLTTEDTAVYFCARDLDIRGGVDIWGQGTLVTVSS

SEQ ID NO: 627 - protein, 107 aa, synthetic construct
  REGION 1..107: note = VL - SARS2.F768_pt1_D11
DIQMTQSPSSLSASVGDRVSITCRASQDINNYLNWYQQKPGKAPRLLIFAASSLQSGVPSRFSGSGSGTDFTLTITSLQPEDFATYYCHQSSTTPWTFGQGTKVEIK

SEQ ID NO: 628 - protein, 118 aa, synthetic construct
  REGION 1..118: note = VH - SARS2.F768_pt1_A05
EVQLVETGGGLIQPGGSLRLSCAASGVIVSRNYMSWVRQAPGKGLEWVSLLFAGGSAFYSDSVKGRFTISRDDSRNTLYLQMNSLRAEDTAVYYCARDLDVRGGLDVWGQGTTVTVSS

SEQ ID NO: 629 - protein, 105 aa, synthetic construct
  REGION 1..105: note = VL - SARS2.F768_pt1_A05
DVQLTQFPSSLSASVGDRVTITCRAGQGIPNYISWYHQRPGKAPRLLIYAASTLQSGVPSRFSGSGSGTDFTLTISSLQPEDFGTYYCQQSDTRTFGPGTKLEIK

SEQ ID NO: 630 - protein, 117 aa, synthetic construct
  REGION 1..117: note = VH - SARS2.F768_pt2_D12
EVQLVESGGGLVQPGGSLRLSCAASEIIVNRNYMSWVRQAPGQGLEWVSLLYAGGSTFYADSVKGRFAISRDDSKNTLYLQMNNLRGDDTAVYYCARDLIDYGMDVWGQGTTVTVSS

SEQ ID NO: 631 - protein, 108 aa, synthetic construct
  REGION 1..108: note = VL - SARS2.F768_pt2_D12
DIQLTQSPSFLSASVGDRVTMTCRASQGISTYLAWYQQKPGKAPKLLIYAASTLQSGVPSRFSGSGSGTEFTLTISSLQPEDFATYYCQQVNSSPPVTFGQGTRLEIK

SEQ ID NO: 632 - protein, 132 aa, synthetic construct
  REGION 1..132: note = VH - SARS2.F770_pt1_G11
EVQLVESGGGRVKPGGSLRLSCAASGFTFSSYRMNWVRQAPGKGLEWVSSISSGSSYIYFADSVKGRFTISRDNAKNSLFLRMNNLRVEDTAVYYCARAPTLRHSSGWYDPPGTENSSFDLWGRGTLVTVSS

SEQ ID NO: 633 - protein, 108 aa, synthetic construct
  REGION 1..108: note = VL - SARS2.F770_pt1_G11
SYVLTQPPSVSVAPGQTARITCGGNNIGTKSVHWYQQKPGQAPVLVISSDSDRPSGVPDRFSGSNSGNTATLTISRVEAGDEADYYCHVWDSSSDHWVFGGGTKLTVL

SEQ ID NO: 634 - protein, 120 aa, synthetic construct
  REGION 1..120: note = VH - SARS2.F769_pt1_B1
QVQLVQSGAEVKEPGASVKVSCKTSGYTFTTYLIHWVRQAPGQGLEWMGVTNPNGDGSSYALNFQGRVTMTSDTSTSTVYMELSSLRSEDTAIYYCARVDDFWSGYWDYWGQGTLVTVST

SEQ ID NO: 635 - protein, 113 aa, synthetic construct
  REGION 1..113: note = VL - SARS2.F769_pt1_B1
QSVLTQPPSVSGAPGQRVTISCTGISSNIGAGYDVHWYQQHPGTAPRLLIYDNTNRPSGVPDRFSGSKSGTSASLAITGLQAEDEADYFCQAYVTGLISSGYVFGTGTKVSVL

SEQ ID NO: 636 - protein, 119 aa, synthetic construct
  REGION 1..119: note = VH - SARS2.F770_pt1_C1
QITLKESGPTLVKRKQTLTLTCTFSGFAFSASGVGVGWVRQPPGKGLEWLALIYWDDDKKYSPSLKSRLSITKDTSKNQVVLTLTNVDALDTGTYYCAHHTVPTIFDFWGQGTLVAVSS

SEQ ID NO: 637 - protein, 111 aa, synthetic construct
  REGION 1..111: note = VL - SARS2.F770_pt1_C1
QSALTQPASVSGSPGQSITISCTGTSSDVGDHNYVSWYQRHPGKAPKLMIYEVTNRPSGVSNRFSGSKSGNTASLTISGLQAEDEADYFCSSYSTSSTPVVFGGGTKLTVL

SEQ ID NO: 638 - protein, 124 aa, synthetic construct
  REGION 1..124: note = VH - SARS2-A20-29.1
EVQLVESGGGLVQPGRSLRLSCAASGFTFDDYAMHWVRQTPGKGLEWVSGISWNSGDIDYADSVKGRFTISRDNAKNSLYLQMNSLRTEDTALYYCTKGWFGEFFGAGSICDYWGQGTLVTVSS

SEQ ID NO: 639 - protein, 8 aa, synthetic construct
  REGION 1..8: note = HCDR1 - SARS2-A20-29.1
GFTFDDYA

SEQ ID NO: 640 - protein, 8 aa, synthetic construct
  REGION 1..8: note = HCDR2 - SARS2-A20-29.1
ISWNSGDI

SEQ ID NO: 641 - protein, 19 aa, synthetic construct
  REGION 1..19: note = HCDR3 - SARS2-A20-29.1
CTKGWFGEFFGAGSICDYW

SEQ ID NO: 642 - protein, 106 aa, synthetic construct
  REGION 1..106: note = VL - SARS2-A20-29.1
EIVMTQSPATLSVSPGERATLSCRASQSVSNNLAWYQQKPGQAPRLLIYGASTRATGIPARFSGSGSGTEFTLTISSLQSEDFAVYYCQQYNNWPLFGQGTKVEIK

SEQ ID NO: 643 - protein, 6 aa, synthetic construct
  REGION 1..6: note = LCDR1 - SARS2-A20-29.1
QSVSNN

SEQ ID NO: 644 - skipped

SEQ ID NO: 645 - protein, 10 aa, synthetic construct [sequence omitted]

SEQ ID NO: 646 - protein, 121 aa, synthetic construct; identical to SEQ ID NO: 74
  REGION 1..121: note = VH - SARS2-A23-58.1

SEQ ID NO: 647 - protein, 8 aa, synthetic construct
  REGION 1..8: note = HCDR1 - SARS2-A23-58.1
GFTFTSSA

SEQ ID NO: 648 - protein, 8 aa, synthetic construct
  REGION 1..8: note = HCDR2 - SARS2-A23-58.1
IVVGSGNT

SEQ ID NO: 649 - protein, 18 aa, synthetic construct
  REGION 1..18: note = HCDR3 - SARS2-A23-58.1
CAAPNCSNVVCYDGFDIW

SEQ ID NO: 650 - protein, 108 aa, synthetic construct; identical to SEQ ID NO: 70
  REGION 1..108: note = VL - SARS2-A23-58.1

SEQ ID NO: 651 - protein, 7 aa, synthetic construct
  REGION 1..7: note = LCDR1 - SARS2-A23-58.1
QSVSSSY

SEQ ID NO: 652 - skipped

SEQ ID NO: 653 - protein, 11 aa, synthetic construct [sequence omitted]

SEQ ID NO: 654 - protein, 121 aa, synthetic construct; identical to SEQ ID NO: 42
  REGION 1..121: note = VH - SARS2-B1-182.1

SEQ ID NO: 655 - skipped

SEQ ID NO: 656 - protein, 8 aa, synthetic construct
  REGION 1..8: note = HCDR1 - SARS2-B1-182.1
GFTFTSSA

SEQ ID NO: 657 - protein, 8 aa, synthetic construct
  REGION 1..8: note = HCDR2 - SARS2-B1-182.1
IVVGSGNT

SEQ ID NO: 658 - protein, 18 aa, synthetic construct
  REGION 1..18: note = HCDR3 - SARS2-B1-182.1
CAAPYCSGGSCFDGFDIW

SEQ ID NO: 659 - protein, 108 aa, synthetic construct; identical to SEQ ID NO: 38
  REGION 1..108: note = VL - SARS2-B1-182.1

SEQ ID NO: 660 - protein, 7 aa, synthetic construct
  REGION 1..7: note = LCDR1 - SARS2-B1-182.1
QSVSSSY

SEQ ID NO: 661 - skipped

SEQ ID NO: 662 - protein, 11 aa, synthetic construct [sequence omitted]

SEQ ID NO: 663 - protein, 127 aa, synthetic construct; identical to SEQ ID NO: 66
  REGION 1..127: note = VH - SARS2-A19-61.1

SEQ ID NO: 664 - protein, 8 aa, synthetic construct
  REGION 1..8: note = HCDR1 - SARS2-A19-61.1
GFTFSSYA

SEQ ID NO: 665 - protein, 8 aa, synthetic construct
  REGION 1..8: note = HCDR2 - SARS2-A19-61.1
ISYDGSNQ

SEQ ID NO: 666 - protein, 22 aa, synthetic construct
  REGION 1..22: note = HCDR3 - SARS2-A19-61.1
CARDLAIAVAGTWHYYNGMDVW

SEQ ID NO: 667 - protein, 107 aa, synthetic construct; identical to SEQ ID NO: 62
  REGION 1..107: note = VL - SARS2-A19-61.1

SEQ ID NO: 668 - protein, 6 aa, synthetic construct
  REGION 1..6: note = LCDR1 - SARS2-A19-61.1
QGISSW

SEQ ID NO: 669 - skipped

SEQ ID NO: 670 - protein, 11 aa, synthetic construct [sequence omitted]

SEQ ID NO: 671 - DNA, 2253 bp, synthetic construct
  misc_feature 1..2253: note = MX828 A19-46   A23-58H/A23-58L93VGLTG   DNA   signal peptide
  source 1..2253: mol_type = other DNA
atgggctggtcctgcatcatcctgtttctggtggccacagccaccggtgtgcactctcagaccgtggtcacacaagagcctagctttagcgtgtcccctggcggcacagtgacactgacatgtggactttctagcggatctgtgtccaccgcctactttcccagctggtatcaacagaccccaggccaggcacctcggacactgatctacggcaccaacacaagatccagcggcgtgcccgataggttcagcggatctatcctgggcaacaaggccgcactgactatcacaggcgcccaggccgatgacgagagcgattactactgcgtgctgtacatgggcagaggcatcgtggtttttggcggaggcaccaagctgacagtgcttggcggatctagcggcgagatcgtgctgacacagagccctggcacactgtcactgtctccaggcgaaagagccacactgagctgtagagccagccagagcgtgtccagctcttacctggcttggtatcagcagaagcccggacaggctcccagactgctgatctactctgccagcagcagagccacaggcatccccgatagattttctggcagcggctccggcaccgacttcaccctgacaatcagcagactggaacccgaggacttcgccgtgtacttctgtcagcagtacgtgggcctgaccggctggacatttggccagggaacaaaggtggaaatcaagggaggcggaggatctggcggatctggaagtggtggcggtggatctgcttctggctctggacaaatgcagctcgttcagagcggccctgaagtgaagaaacctggcacctccgtgaaggtgtcctgcaaggccagcggcttcacctttacaagctctgccgtgcagtgggttcgacaagctagaggccagagactggaatggatcggctggatcgttgtcggcagcggcaacaccaattacgcccagaaattccaagagcgcgtgaccatcaccagagacatgagcaccagcacagcctacatggaactgagcagtctgcgcagcgaagataccgctgtgtactattgtgccgctcctaactgcagcaacgtcgtgtgctacgatggcttcgacatctggggacagggcacaatggtcaccgtgtcctctggcggaagtagcggccaggtgcagctggttgaatctggtggcggagttgtgcagcctggcagaagcctgagactgtcttgtgccgcctctggctttaccctgagcagctatggcatgcactgggtccgacaggcccctggcaaaggacttgaatgggtcgccgtgatcagctacgacggcagcaacaagtactacgtggacagcgtgaagggcagattcaccatcagccgggacaacagcaagaacaccctgtacctgcagatgaacagcctgagagccgaggacacagccgtgtattattgcgccagaggctgggcctattgggagctgctgcctgactactactacggcatggatgtgtggggccagggaaccacagtgaccgtgtctagcgcttctggcggctccggagataagacccacacatgtcctccatgtcctgctccagaactgctcggcggcccttctgtgttcctgtttcctccaaagcctaaggacaccctgatgatcagcagaacccctgaagtgacctgcgtggtggtggatgtgtctcacgaggaccccgaagtgaagttcaattggtacgtggacggcgtggaagtgcacaacgccaagaccaagcctagagaggaacagtacaacagcacctacagagtggtgtccgtgctgaccgtgctgcaccaggattggctgaacggcaaagagtacaagtgcaaggtgtccaacaaggccctgcctgctcctatcgagaaaaccatcagcaaggccaagggccagcctagggaaccccaggtttacacccttcctccaagccgggatgagctgaccaagaaccaggtgtccctgacatgtctcgtgaagggcttctaccccagcgacattgccgtggaatgggagagcaatggccagcctgagaacaactacaagacaacccctcctgtgctggacagcgacggctcattcttcctgtacagcaagctgacagtcgacaagtccagatggcagcagggcaacgtgttcagttgcagcgtgctgcacgaggccctgcacagtcactacacccagaagtccctgagcctgtctcctggatagtga

SEQ ID NO: 672 - DNA, 2196 bp, synthetic construct
  misc_feature 1..2196: note = MX828 A19-46   A23-58H/A23-58L93VGLTG   DNA   without signal peptide
  source 1..2196: mol_type = other DNA
cagaccgtggtcacacaagagcctagctttagcgtgtcccctggcggcacagtgacactgacatgtggactttctagcggatctgtgtccaccgcctactttcccagctggtatcaacagaccccaggccaggcacctcggacactgatctacggcaccaacacaagatccagcggcgtgcccgataggttcagcggatctatcctgggcaacaaggccgcactgactatcacaggcgcccaggccgatgacgagagcgattactactgcgtgctgtacatgggcagaggcatcgtggtttttggcggaggcaccaagctgacagtgcttggcggatctagcggcgagatcgtgctgacacagagccctggcacactgtcactgtctccaggcgaaagagccacactgagctgtagagccagccagagcgtgtccagctcttacctggcttggtatcagcagaagcccggacaggctcccagactgctgatctactctgccagcagcagagccacaggcatccccgatagattttctggcagcggctccggcaccgacttcaccctgacaatcagcagactggaacccgaggacttcgccgtgtacttctgtcagcagtacgtgggcctgaccggctggacatttggccagggaacaaaggtggaaatcaagggaggcggaggatctggcggatctggaagtggtggcggtggatctgcttctggctctggacaaatgcagctcgttcagagcggccctgaagtgaagaaacctggcacctccgtgaaggtgtcctgcaaggccagcggcttcacctttacaagctctgccgtgcagtgggttcgacaagctagaggccagagactggaatggatcggctggatcgttgtcggcagcggcaacaccaattacgcccagaaattccaagagcgcgtgaccatcaccagagacatgagcaccagcacagcctacatggaactgagcagtctgcgcagcgaagataccgctgtgtactattgtgccgctcctaactgcagcaacgtcgtgtgctacgatggcttcgacatctggggacagggcacaatggtcaccgtgtcctctggcggaagtagcggccaggtgcagctggttgaatctggtggcggagttgtgcagcctggcagaagcctgagactgtcttgtgccgcctctggctttaccctgagcagctatggcatgcactgggtccgacaggcccctggcaaaggacttgaatgggtcgccgtgatcagctacgacggcagcaacaagtactacgtggacagcgtgaagggcagattcaccatcagccgggacaacagcaagaacaccctgtacctgcagatgaacagcctgagagccgaggacacagccgtgtattattgcgccagaggctgggcctattgggagctgctgcctgactactactacggcatggatgtgtggggccagggaaccacagtgaccgtgtctagcgcttctggcggctccggagataagacccacacatgtcctccatgtcctgctccagaactgctcggcggcccttctgtgttcctgtttcctccaaagcctaaggacaccctgatgatcagcagaacccctgaagtgacctgcgtggtggtggatgtgtctcacgaggaccccgaagtgaagttcaattggtacgtggacggcgtggaagtgcacaacgccaagaccaagcctagagaggaacagtacaacagcacctacagagtggtgtccgtgctgaccgtgctgcaccaggattggctgaacggcaaagagtacaagtgcaaggtgtccaacaaggccctgcctgctcctatcgagaaaaccatcagcaaggccaagggccagcctagggaaccccaggtttacacccttcctccaagccgggatgagctgaccaagaaccaggtgtccctgacatgtctcgtgaagggcttctaccccagcgacattgccgtggaatgggagagcaatggccagcctgagaacaactacaagacaacccctcctgtgctggacagcgacggctcattcttcctgtacagcaagctgacagtcgacaagtccagatggcagcagggcaacgtgttcagttgcagcgtgctgcacgaggccctgcacagtcactacacccagaagtccctgagcctgtctcctggatagtga

SEQ ID NO: 673 - DNA, 4437 bp, synthetic construct
  misc_feature 1..4437: note = MX829 A19-61   A23-58H/A23-58L93VGLTG   DNA   with signal peptide
  source 1..4437: mol_type = other DNA
atgggctggtcctgcatcatcctgtttctggtggccacagccaccggtgtgcactctgacatccagatgacacagagccctagcagcgtgtccgcctctgtgggagacagagtgatcatcacctgtagagccagccagggcatcagctcttggctggcttggtatcagcagaagcctggcaaggcccctaaggtgctgatctacgatgccagctctctgcagtctggcgtgcccagcagattttctggcagcggctacggcaccgacttcaccctgaccatatctagcctgcagcctgaggacagcgccacctactattgtcagcaggccaagtctttccccatcaccttcggccagggcaccagactggaaatcaaaggcggaagctctggcgagatcgtgctgacacagagccctggcacactgtcactgtctccaggcgaaagagccacactgagctgtagagccagccagagcgtgtccagctcttacctggcttggtatcagcagaagcccggacaggctcccagactgctgatctactctgccagcagcagagccacaggcatccccgatagattttctggcagcggctccggcaccgacttcaccctgacaatcagcagactggaacccgaggacttcgccgtgtacttctgtcagcagtacgtgggcctgaccggctggacatttggccagggaacaaaggtggaaatcaagggcggcggaggaagcggcggatctggatctggtggcggaggatctgcttctggctctggacagatgcagctggtgcagtctggccccgaagtgaagaaacctggcaccagcgtgaaggtgtcctgcaaggccagcggcttcacctttacaagctctgccgtgcagtgggtccgacaggcaagaggacaacggctggaatggatcggctggatcgttgtcggcagcggcaacaccaattacgcccagaaattccaagagcgcgtgaccatcaccagagacatgagcaccagcaccgcctacatggaactgagcagcctgagaagcgaggacacagcagtgtactattgcgccgctcctaactgctccaacgtcgtgtgctacgacggcttcgatatctggggccagggaaccatggtcaccgtgtcaagtggcggatctagcggccaggttcagctggttgaatctggcggaggtgttgtgcagcctggcagatccctgagactgtcttgtgccgcctccggctttaccttcagctcctacgccttccactgggttcgacaagcccctggcaaaggcctggaatgggttgccgtgatcagctacgacggcagcaaccagtactacgccgactccgtgaagggcagattcaccatcagccgggacaacagcaagaacaccctgtacctgcagatgaacagcctgcgggccgatgacaccgctgtgtattattgtgcccgcgacctggccattgccgtggctggaacatggcactactacaacggcatggacgtgtggggccaaggcaccacagtgacagtgtctagtgcttctggcggctccggagataagacccacacatgtcctccatgtcctgctccagaactgctcggcggcccttctgtgttcctgtttcctccaaagcctaaggacaccctgatgatcagcagaacccctgaagtgacctgcgtggtggtggatgtgtctcacgaggaccccgaagtgaagttcaattggtacgtggacggcgtggaagtgcacaacgccaagaccaagcctagagaggaacagtacaacagcacctacagagtggtgtccgtgctgaccgtgctgcaccaggattggctgaacggcaaagagtacaagtgcaaggtgtccaacaaggccctgcctgctcctatcgagaaaaccatcagcaaggccaagggccagcctagggaaccccaggtttacacccttcctccaagccgggatgagctgaccaagaaccaggtgtccctgacatgtctcgtgaagggcttctaccccagcgacattgccgtggaatgggagagcaatggccagcctgagaacaactacaagacaacccctcctgtgctggacagcgacggctcattcttcctgtacagcaagctgacagtcgacaagtccagatggcagcagggcaacgtgttcagttgcagcgtgctgcacgaggccctgcacagtcactacacccagaagtccctgagcctgtctcctggatagtgagacatccagatgacacagagccctagcagcgtgtccgcctctgtgggagacagagtgatcatcacctgtagagccagccagggcatcagctcttggctggcttggtatcagcagaagcctggcaaggcccctaaggtgctgatctacgatgccagctctctgcagtctggcgtgcccagcagattttctggcagcggctacggcaccgacttcaccctgaccatatctagcctgcagcctgaggacagcgccacctactattgtcagcaggccaagtctttccccatcaccttcggccagggcaccagactggaaatcaaaggcggaagctctggcgagatcgtgctgacacagagccctggcacactgtcactgtctccaggcgaaagagccacactgagctgtagagccagccagagcgtgtccagctcttacctggcttggtatcagcagaagcccggacaggctcccagactgctgatctactctgccagcagcagagccacaggcatccccgatagattttctggcagcggctccggcaccgacttcaccctgacaatcagcagactggaacccgaggacttcgccgtgtacttctgtcagcagtacgtgggcctgaccggctggacatttggccagggaacaaaggtggaaatcaagggcggcggaggaagcggcggatctggatctggtggcggaggatctgcttctggctctggacagatgcagctggtgcagtctggccccgaagtgaagaaacctggcaccagcgtgaaggtgtcctgcaaggccagcggcttcacctttacaagctctgccgtgcagtgggtccgacaggcaagaggacaacggctggaatggatcggctggatcgttgtcggcagcggcaacaccaattacgcccagaaattccaagagcgcgtgaccatcaccagagacatgagcaccagcaccgcctacatggaactgagcagcctgagaagcgaggacacagcagtgtactattgcgccgctcctaactgctccaacgtcgtgtgctacgacggcttcgatatctggggccagggaaccatggtcaccgtgtcaagtggcggatctagcggccaggttcagctggttgaatctggcggaggtgttgtgcagcctggcagatccctgagactgtcttgtgccgcctccggctttaccttcagctcctacgccttccactgggttcgacaagcccctggcaaaggcctggaatgggttgccgtgatcagctacgacggcagcaaccagtactacgccgactccgtgaagggcagattcaccatcagccgggacaacagcaagaacaccctgtacctgcagatgaacagcctgcgggccgatgacaccgctgtgtattattgtgcccgcgacctggccattgccgtggctggaacatggcactactacaacggcatggacgtgtggggccaaggcaccacagtgacagtgtctagtgcttctggcggctccggagataagacccacacatgtcctccatgtcctgctccagaactgctcggcggcccttctgtgttcctgtttcctccaaagcctaaggacaccctgatgatcagcagaacccctgaagtgacctgcgtggtggtggatgtgtctcacgaggaccccgaagtgaagttcaattggtacgtggacggcgtggaagtgcacaacgccaagaccaagcctagagaggaacagtacaacagcacctacagagtggtgtccgtgctgaccgtgctgcaccaggattggctgaacggcaaagagtacaagtgcaaggtgtccaacaaggccctgcctgctcctatcgagaaaaccatcagcaaggccaagggccagcctagggaaccccaggtttacacccttcctccaagccgggatgagctgaccaagaaccaggtgtccctgacatgtctcgtgaagggcttctaccccagcgacattgccgtggaatgggagagcaatggccagcctgagaacaactacaagacaacccctcctgtgctggacagcgacggctcattcttcctgtacagcaagctgacagtcgacaagtccagatggcagcagggcaacgtgttcagttgcagcgtgctgcacgaggccctgcacagtcactacacccagaagtccctgagcctgtctcctggatagtga

SEQ ID NO: 674 - DNA, 2190 bp, synthetic construct
  misc_feature 1..2190: note = MX829 A19-61   A23-58H/A23-58L93VGLTG   DNA   without signal peptide
  source 1..2190: mol_type = other DNA
gacatccagatgacacagagccctagcagcgtgtccgcctctgtgggagacagagtgatcatcacctgtagagccagccagggcatcagctcttggctggcttggtatcagcagaagcctggcaaggcccctaaggtgctgatctacgatgccagctctctgcagtctggcgtgcccagcagattttctggcagcggctacggcaccgacttcaccctgaccatatctagcctgcagcctgaggacagcgccacctactattgtcagcaggccaagtctttccccatcaccttcggccagggcaccagactggaaatcaaaggcggaagctctggcgagatcgtgctgacacagagccctggcacactgtcactgtctccaggcgaaagagccacactgagctgtagagccagccagagcgtgtccagctcttacctggcttggtatcagcagaagcccggacaggctcccagactgctgatctactctgccagcagcagagccacaggcatccccgatagattttctggcagcggctccggcaccgacttcaccctgacaatcagcagactggaacccgaggacttcgccgtgtacttctgtcagcagtacgtgggcctgaccggctggacatttggccagggaacaaaggtggaaatcaagggcggcggaggaagcggcggatctggatctggtggcggaggatctgcttctggctctggacagatgcagctggtgcagtctggccccgaagtgaagaaacctggcaccagcgtgaaggtgtcctgcaaggccagcggcttcacctttacaagctctgccgtgcagtgggtccgacaggcaagaggacaacggctggaatggatcggctggatcgttgtcggcagcggcaacaccaattacgcccagaaattccaagagcgcgtgaccatcaccagagacatgagcaccagcaccgcctacatggaactgagcagcctgagaagcgaggacacagcagtgtactattgcgccgctcctaactgctccaacgtcgtgtgctacgacggcttcgatatctggggccagggaaccatggtcaccgtgtcaagtggcggatctagcggccaggttcagctggttgaatctggcggaggtgttgtgcagcctggcagatccctgagactgtcttgtgccgcctccggctttaccttcagctcctacgccttccactgggttcgacaagcccctggcaaaggcctggaatgggttgccgtgatcagctacgacggcagcaaccagtactacgccgactccgtgaagggcagattcaccatcagccgggacaacagcaagaacaccctgtacctgcagatgaacagcctgcgggccgatgacaccgctgtgtattattgtgcccgcgacctggccattgccgtggctggaacatggcactactacaacggcatggacgtgtggggccaaggcaccacagtgacagtgtctagtgcttctggcggctccggagataagacccacacatgtcctccatgtcctgctccagaactgctcggcggcccttctgtgttcctgtttcctccaaagcctaaggacaccctgatgatcagcagaacccctgaagtgacctgcgtggtggtggatgtgtctcacgaggaccccgaagtgaagttcaattggtacgtggacggcgtggaagtgcacaacgccaagaccaagcctagagaggaacagtacaacagcacctacagagtggtgtccgtgctgaccgtgctgcaccaggattggctgaacggcaaagagtacaagtgcaaggtgtccaacaaggccctgcctgctcctatcgagaaaaccatcagcaaggccaagggccagcctagggaaccccaggtttacacccttcctccaagccgggatgagctgaccaagaaccaggtgtccctgacatgtctcgtgaagggcttctaccccagcgacattgccgtggaatgggagagcaatggccagcctgagaacaactacaagacaacccctcctgtgctggacagcgacggctcattcttcctgtacagcaagctgacagtcgacaagtccagatggcagcagggcaacgtgttcagttgcagcgtgctgcacgaggccctgcacagtcactacacccagaagtccctgagcctgtctcctggatagtga

SEQ ID NO: 675 - DNA, 2253 bp, synthetic construct
  misc_feature 1..2253: note = MX830 A19-46   A23-58H/A23-58L94GLTG   DNA   with signal peptide
  source 1..2253: mol_type = other DNA
atgggctggtcctgcatcatcctgtttctggtggccacagccaccggtgtgcactctcagaccgtggtcacacaagagcctagctttagcgtgtcccctggcggcacagtgacactgacatgtggactttctagcggatctgtgtccaccgcctactttcccagctggtatcaacagaccccaggccaggcacctcggacactgatctacggcaccaacacaagatccagcggcgtgcccgataggttcagcggatctatcctgggcaacaaggccgcactgactatcacaggcgcccaggccgatgacgagagcgattactactgcgtgctgtacatgggcagaggcatcgtggtttttggcggaggcaccaagctgacagtgcttggcggatctagcggcgagatcgtgctgacacagagccctggcacactgtcactgtctccaggcgaaagagccacactgagctgtagagccagccagagcgtgtccagctcttacctggcttggtatcagcagaagcccggacaggctcccagactgctgatctactctgccagcagcagagccacaggcatccccgatagattttctggcagcggctccggcaccgacttcaccctgacaatcagcagactggaacccgaggacttcgccgtgtacttctgtcagcagtacggcggcctgaccggctggacatttggacagggaacaaaggtggaaatcaagggaggcggaggatctggcggatctggaagtggtggcggtggatctgcttctggctctggacaaatgcagctcgttcagagcggccctgaagtgaagaaacctggcacctccgtgaaggtgtcctgcaaggccagcggcttcacctttacaagctctgccgtgcagtgggttcgacaagctagaggccagagactggaatggatcggctggatcgttgtcggcagcggcaacaccaattacgcccagaaattccaagagcgcgtgaccatcaccagagacatgagcaccagcacagcctacatggaactgagcagtctgcgcagcgaagataccgctgtgtactattgtgccgctcctaactgcagcaacgtcgtgtgctacgatggcttcgacatctggggacagggcacaatggtcaccgtgtcctctggcggaagtagcggccaggtgcagctggttgaatctggtggcggagttgtgcagcctggcagaagcctgagactgtcttgtgccgcctctggctttaccctgagcagctatggcatgcactgggtccgacaggcccctggcaaaggacttgaatgggtcgccgtgatcagctacgacggcagcaacaagtactacgtggacagcgtgaagggcagattcaccatcagccgggacaacagcaagaacaccctgtacctgcagatgaacagcctgagagccgaggacacagccgtgtattattgcgccagaggctgggcctattgggagctgctgcctgactactactacggcatggatgtgtggggccagggaaccacagtgaccgtgtctagcgcttctggcggctccggagataagacccacacatgtcctccatgtcctgctccagaactgctcggcggcccttctgtgttcctgtttcctccaaagcctaaggacaccctgatgatcagcagaacccctgaagtgacctgcgtggtggtggatgtgtctcacgaggaccccgaagtgaagttcaattggtacgtggacggcgtggaagtgcacaacgccaagaccaagcctagagaggaacagtacaacagcacctacagagtggtgtccgtgctgaccgtgctgcaccaggattggctgaacggcaaagagtacaagtgcaaggtgtccaacaaggccctgcctgctcctatcgagaaaaccatcagcaaggccaagggccagcctagggaaccccaggtttacacccttcctccaagccgggatgagctgaccaagaaccaggtgtccctgacatgtctcgtgaagggcttctaccccagcgacattgccgtggaatgggagagcaatggccagcctgagaacaactacaagacaacccctcctgtgctggacagcgacggctcattcttcctgtacagcaagctgacagtcgacaagtccagatggcagcagggcaacgtgttcagttgcagcgtgctgcacgaggccctgcacagtcactacacccagaagtccctgagcctgtctcctggatagtga

SEQ ID NO: 676 - DNA, 2196 bp, synthetic construct
  misc_feature 1..2196: note = MX830 A19-46   A23-58H/A23-58L94GLTG   DNA   without signal peptide
  source 1..2196: mol_type = other DNA
cagaccgtggtcacacaagagcctagctttagcgtgtcccctggcggcacagtgacactgacatgtggactttctagcggatctgtgtccaccgcctactttcccagctggtatcaacagaccccaggccaggcacctcggacactgatctacggcaccaacacaagatccagcggcgtgcccgataggttcagcggatctatcctgggcaacaaggccgcactgactatcacaggcgcccaggccgatgacgagagcgattactactgcgtgctgtacatgggcagaggcatcgtggtttttggcggaggcaccaagctgacagtgcttggcggatctagcggcgagatcgtgctgacacagagccctggcacactgtcactgtctccaggcgaaagagccacactgagctgtagagccagccagagcgtgtccagctcttacctggcttggtatcagcagaagcccggacaggctcccagactgctgatctactctgccagcagcagagccacaggcatccccgatagattttctggcagcggctccggcaccgacttcaccctgacaatcagcagactggaacccgaggacttcgccgtgtacttctgtcagcagtacggcggcctgaccggctggacatttggacagggaacaaaggtggaaatcaagggaggcggaggatctggcggatctggaagtggtggcggtggatctgcttctggctctggacaaatgcagctcgttcagagcggccctgaagtgaagaaacctggcacctccgtgaaggtgtcctgcaaggccagcggcttcacctttacaagctctgccgtgcagtgggttcgacaagctagaggccagagactggaatggatcggctggatcgttgtcggcagcggcaacaccaattacgcccagaaattccaagagcgcgtgaccatcaccagagacatgagcaccagcacagcctacatggaactgagcagtctgcgcagcgaagataccgctgtgtactattgtgccgctcctaactgcagcaacgtcgtgtgctacgatggcttcgacatctggggacagggcacaatggtcaccgtgtcctctggcggaagtagcggccaggtgcagctggttgaatctggtggcggagttgtgcagcctggcagaagcctgagactgtcttgtgccgcctctggctttaccctgagcagctatggcatgcactgggtccgacaggcccctggcaaaggacttgaatgggtcgccgtgatcagctacgacggcagcaacaagtactacgtggacagcgtgaagggcagattcaccatcagccgggacaacagcaagaacaccctgtacctgcagatgaacagcctgagagccgaggacacagccgtgtattattgcgccagaggctgggcctattgggagctgctgcctgactactactacggcatggatgtgtggggccagggaaccacagtgaccgtgtctagcgcttctggcggctccggagataagacccacacatgtcctccatgtcctgctccagaactgctcggcggcccttctgtgttcctgtttcctccaaagcctaaggacaccctgatgatcagcagaacccctgaagtgacctgcgtggtggtggatgtgtctcacgaggaccccgaagtgaagttcaattggtacgtggacggcgtggaagtgcacaacgccaagaccaagcctagagaggaacagtacaacagcacctacagagtggtgtccgtgctgaccgtgctgcaccaggattggctgaacggcaaagagtacaagtgcaaggtgtccaacaaggccctgcctgctcctatcgagaaaaccatcagcaaggccaagggccagcctagggaaccccaggtttacacccttcctccaagccgggatgagctgaccaagaaccaggtgtccctgacatgtctcgtgaagggcttctaccccagcgacattgccgtggaatgggagagcaatggccagcctgagaacaactacaagacaacccctcctgtgctggacagcgacggctcattcttcctgtacagcaagctgacagtcgacaagtccagatggcagcagggcaacgtgttcagttgcagcgtgctgcacgaggccctgcacagtcactacacccagaagtccctgagcctgtctcctggatagtga

SEQ ID NO: 677 - DNA, 2247 bp, synthetic construct
  misc_feature 1..2247: note = MX831 A19-61   A23-58H/A23-58L94GLTG   DNA   with signal peptide
  source 1..2247: mol_type = other DNA
atgggctggtcctgcatcatcctgtttctggtggccacagccaccggtgtgcactctgacatccagatgacacagagccctagcagcgtgtccgcctctgtgggagacagagtgatcatcacctgtagagccagccagggcatcagctcttggctggcttggtatcagcagaagcctggcaaggcccctaaggtgctgatctacgatgccagctctctgcagtctggcgtgcccagcagattttctggcagcggctacggcaccgacttcaccctgaccatatctagcctgcagcctgaggacagcgccacctactattgtcagcaggccaagtctttccccatcaccttcggccagggcaccagactggaaatcaaaggcggaagctctggcgagatcgtgctgacacagagccctggcacactgtcactgtctccaggcgaaagagccacactgagctgtagagccagccagagcgtgtccagctcttacctggcttggtatcagcagaagcccggacaggctcccagactgctgatctactctgccagcagcagagccacaggcatccccgatagattttctggcagcggctccggcaccgacttcaccctgacaatcagcagactggaacccgaggacttcgccgtgtacttctgtcagcagtacggcggcctgaccggctggacatttggacagggaacaaaggtggaaatcaagggcggcggaggaagcggcggatctggatctggtggcggaggatctgcttctggctctggacagatgcagctggtgcagtctggccccgaagtgaagaaacctggcaccagcgtgaaggtgtcctgcaaggccagcggcttcacctttacaagctctgccgtgcagtgggtccgacaggcaagaggacaacggctggaatggatcggctggatcgttgtcggcagcggcaacaccaattacgcccagaaattccaagagcgcgtgaccatcaccagagacatgagcaccagcaccgcctacatggaactgagcagcctgagaagcgaggacacagcagtgtactattgcgccgctcctaactgctccaacgtcgtgtgctacgacggcttcgatatctggggccagggaaccatggtcaccgtgtcaagtggcggatctagcggccaggttcagctggttgaatctggcggaggtgttgtgcagcctggcagatccctgagactgtcttgtgccgcctccggctttaccttcagctcctacgccttccactgggttcgacaagcccctggcaaaggcctggaatgggttgccgtgatcagctacgacggcagcaaccagtactacgccgactccgtgaagggcagattcaccatcagccgggacaacagcaagaacaccctgtacctgcagatgaacagcctgcgggccgatgacaccgctgtgtattattgtgcccgcgacctggccattgccgtggctggaacatggcactactacaacggcatggacgtgtggggccaaggcaccacagtgacagtgtctagtgcttctggcggctccggagataagacccacacatgtcctccatgtcctgctccagaactgctcggcggcccttctgtgttcctgtttcctccaaagcctaaggacaccctgatgatcagcagaacccctgaagtgacctgcgtggtggtggatgtgtctcacgaggaccccgaagtgaagttcaattggtacgtggacggcgtggaagtgcacaacgccaagaccaagcctagagaggaacagtacaacagcacctacagagtggtgtccgtgctgaccgtgctgcaccaggattggctgaacggcaaagagtacaagtgcaaggtgtccaacaaggccctgcctgctcctatcgagaaaaccatcagcaaggccaagggccagcctagggaaccccaggtttacacccttcctccaagccgggatgagctgaccaagaaccaggtgtccctgacatgtctcgtgaagggcttctaccccagcgacattgccgtggaatgggagagcaatggccagcctgagaacaactacaagacaacccctcctgtgctggacagcgacggctcattcttcctgtacagcaagctgacagtcgacaagtccagatggcagcagggcaacgtgttcagttgcagcgtgctgcacgaggccctgcacagtcactacacccagaagtccctgagcctgtctcctggatagtga

SEQ ID NO: 678 - DNA, 2190 bp, synthetic construct
  misc_feature 1..2190: note = MX831 A19-61   A23-58H/A23-58L94GLTG   DNA   without signal peptide
  source 1..2190: mol_type = other DNA
gacatccagatgacacagagccctagcagcgtgtccgcctctgtgggagacagagtgatcatcacctgtagagccagccagggcatcagctcttggctggcttggtatcagcagaagcctggcaaggcccctaaggtgctgatctacgatgccagctctctgcagtctggcgtgcccagcagattttctggcagcggctacggcaccgacttcaccctgaccatatctagcctgcagcctgaggacagcgccacctactattgtcagcaggccaagtctttccccatcaccttcggccagggcaccagactggaaatcaaaggcggaagctctggcgagatcgtgctgacacagagccctggcacactgtcactgtctccaggcgaaagagccacactgagctgtagagccagccagagcgtgtccagctcttacctggcttggtatcagcagaagcccggacaggctcccagactgctgatctactctgccagcagcagagccacaggcatccccgatagattttctggcagcggctccggcaccgacttcaccctgacaatcagcagactggaacccgaggacttcgccgtgtacttctgtcagcagtacggcggcctgaccggctggacatttggacagggaacaaaggtggaaatcaagggcggcggaggaagcggcggatctggatctggtggcggaggatctgcttctggctctggacagatgcagctggtgcagtctggccccgaagtgaagaaacctggcaccagcgtgaaggtgtcctgcaaggccagcggcttcacctttacaagctctgccgtgcagtgggtccgacaggcaagaggacaacggctggaatggatcggctggatcgttgtcggcagcggcaacaccaattacgcccagaaattccaagagcgcgtgaccatcaccagagacatgagcaccagcaccgcctacatggaactgagcagcctgagaagcgaggacacagcagtgtactattgcgccgctcctaactgctccaacgtcgtgtgctacgacggcttcgatatctggggccagggaaccatggtcaccgtgtcaagtggcggatctagcggccaggttcagctggttgaatctggcggaggtgttgtgcagcctggcagatccctgagactgtcttgtgccgcctccggctttaccttcagctcctacgccttccactgggttcgacaagcccctggcaaaggcctggaatgggttgccgtgatcagctacgacggcagcaaccagtactacgccgactccgtgaagggcagattcaccatcagccgggacaacagcaagaacaccctgtacctgcagatgaacagcctgcgggccgatgacaccgctgtgtattattgtgcccgcgacctggccattgccgtggctggaacatggcactactacaacggcatggacgtgtggggccaaggcaccacagtgacagtgtctagtgcttctggcggctccggagataagacccacacatgtcctccatgtcctgctccagaactgctcggcggcccttctgtgttcctgtttcctccaaagcctaaggacaccctgatgatcagcagaacccctgaagtgacctgcgtggtggtggatgtgtctcacgaggaccccgaagtgaagttcaattggtacgtggacggcgtggaagtgcacaacgccaagaccaagcctagagaggaacagtacaacagcacctacagagtggtgtccgtgctgaccgtgctgcaccaggattggctgaacggcaaagagtacaagtgcaaggtgtccaacaaggccctgcctgctcctatcgagaaaaccatcagcaaggccaagggccagcctagggaaccccaggtttacacccttcctccaagccgggatgagctgaccaagaaccaggtgtccctgacatgtctcgtgaagggcttctaccccagcgacattgccgtggaatgggagagcaatggccagcctgagaacaactacaagacaacccctcctgtgctggacagcgacggctcattcttcctgtacagcaagctgacagtcgacaagtccagatggcagcagggcaacgtgttcagttgcagcgtgctgcacgaggccctgcacagtcactacacccagaagtccctgagcctgtctcctggatagtga

SEQ ID NO: 679 - DNA, 2253 bp, synthetic construct
  misc_feature 1..2253: note = MX834 A19-46   A23-58H/A23-58L93VGLTG   Knob   DNA with signal peptide
  source 1..2253: mol_type = other DNA
atgggctggtcctgcatcatcctgtttctggtggccacagccaccggtgtgcactctcagaccgtggtcacacaagagcctagctttagcgtgtcccctggcggcacagtgacactgacatgtggactttctagcggatctgtgtccaccgcctactttcccagctggtatcaacagaccccaggccaggcacctcggacactgatctacggcaccaacacaagatccagcggcgtgcccgataggttcagcggatctatcctgggcaacaaggccgcactgactatcacaggcgcccaggccgatgacgagagcgattactactgcgtgctgtacatgggcagaggcatcgtggtttttggcggaggcaccaagctgacagtgcttggcggatctagcggcgagatcgtgctgacacagagccctggcacactgtcactgtctccaggcgaaagagccacactgagctgtagagccagccagagcgtgtccagctcttacctggcttggtatcagcagaagcccggacaggctcccagactgctgatctactctgccagcagcagagccacaggcatccccgatagattttctggcagcggctccggcaccgacttcaccctgacaatcagcagactggaacccgaggacttcgccgtgtacttctgtcagcagtacgtgggcctgaccggctggacatttggccagggaacaaaggtggaaatcaagggaggcggaggatctggcggatctggaagtggtggcggtggatctgcttctggctctggacaaatgcagctcgttcagagcggccctgaagtgaagaaacctggcacctccgtgaaggtgtcctgcaaggccagcggcttcacctttacaagctctgccgtgcagtgggttcgacaagctagaggccagagactggaatggatcggctggatcgttgtcggcagcggcaacaccaattacgcccagaaattccaagagcgcgtgaccatcaccagagacatgagcaccagcacagcctacatggaactgagcagtctgcgcagcgaagataccgctgtgtactattgtgccgctcctaactgcagcaacgtcgtgtgctacgatggcttcgacatctggggacagggcacaatggtcaccgtgtcctctggcggaagtagcggccaggtgcagctggttgaatctggtggcggagttgtgcagcctggcagaagcctgagactgtcttgtgccgcctctggctttaccctgagcagctatggcatgcactgggtccgacaggcccctggcaaaggacttgaatgggtcgccgtgatcagctacgacggcagcaacaagtactacgtggacagcgtgaagggcagattcaccatcagccgggacaacagcaagaacaccctgtacctgcagatgaacagcctgagagccgaggacacagccgtgtattattgcgccagaggctgggcctattgggagctgctgcctgactactactacggcatggatgtgtggggccagggaaccacagtgaccgtgtctagcgcttctggcggctccggagataagacccacacatgtcctccatgtcctgctccagaactgctcggcggcccttctgtgttcctgtttcctccaaagcctaaggacaccctgatgatcagcagaacccctgaagtgacctgcgtggtggtggatgtgtctcacgaggaccccgaagtgaagttcaattggtacgtggacggcgtggaagtgcacaacgccaagaccaagcctagagaggaacagtacaacagcacctacagagtggtgtccgtgctgaccgtgctgcaccaggattggctgaacggcaaagagtacaagtgcaaggtgtccaacaaggccctgcctgctcctatcgagaaaaccatcagcaaggccaagggccagcctagggaaccccaggtttacacccttcctccatgccgggatgagctgaccaagaaccaggtgtccctgtggtgtctcgtgaagggcttctaccccagcgacattgccgtggaatgggagagcaatggccagcctgagaacaactacaagacaacccctcctgtgctggacagcgacggctcattcttcctgtacagcaagctgacagtcgacaagtccagatggcagcagggcaacgtgttcagttgcagcgtgctgcacgaggccctgcacagtcactacacccagaagtccctgagcctgtctcctggatagtga

SEQ ID NO: 680 - DNA, 2196 bp, synthetic construct
  misc_feature 1..2196: note = MX834 A19-46   A23-58H/A23-58L93VGLTG   Knob   DNA without signal peptide
  source 1..2196: mol_type = other DNA
cagaccgtggtcacacaagagcctagctttagcgtgtcccctggcggcacagtgacactgacatgtggactttctagcggatctgtgtccaccgcctactttcccagctggtatcaacagaccccaggccaggcacctcggacactgatctacggcaccaacacaagatccagcggcgtgcccgataggttcagcggatctatcctgggcaacaaggccgcactgactatcacaggcgcccaggccgatgacgagagcgattactactgcgtgctgtacatgggcagaggcatcgtggtttttggcggaggcaccaagctgacagtgcttggcggatctagcggcgagatcgtgctgacacagagccctggcacactgtcactgtctccaggcgaaagagccacactgagctgtagagccagccagagcgtgtccagctcttacctggcttggtatcagcagaagcccggacaggctcccagactgctgatctactctgccagcagcagagccacaggcatccccgatagattttctggcagcggctccggcaccgacttcaccctgacaatcagcagactggaacccgaggacttcgccgtgtacttctgtcagcagtacgtgggcctgaccggctggacatttggccagggaacaaaggtggaaatcaagggaggcggaggatctggcggatctggaagtggtggcggtggatctgcttctggctctggacaaatgcagctcgttcagagcggccctgaagtgaagaaacctggcacctccgtgaaggtgtcctgcaaggccagcggcttcacctttacaagctctgccgtgcagtgggttcgacaagctagaggccagagactggaatggatcggctggatcgttgtcggcagcggcaacaccaattacgcccagaaattccaagagcgcgtgaccatcaccagagacatgagcaccagcacagcctacatggaactgagcagtctgcgcagcgaagataccgctgtgtactattgtgccgctcctaactgcagcaacgtcgtgtgctacgatggcttcgacatctggggacagggcacaatggtcaccgtgtcctctggcggaagtagcggccaggtgcagctggttgaatctggtggcggagttgtgcagcctggcagaagcctgagactgtcttgtgccgcctctggctttaccctgagcagctatggcatgcactgggtccgacaggcccctggcaaaggacttgaatgggtcgccgtgatcagctacgacggcagcaacaagtactacgtggacagcgtgaagggcagattcaccatcagccgggacaacagcaagaacaccctgtacctgcagatgaacagcctgagagccgaggacacagccgtgtattattgcgccagaggctgggcctattgggagctgctgcctgactactactacggcatggatgtgtggggccagggaaccacagtgaccgtgtctagcgcttctggcggctccggagataagacccacacatgtcctccatgtcctgctccagaactgctcggcggcccttctgtgttcctgtttcctccaaagcctaaggacaccctgatgatcagcagaacccctgaagtgacctgcgtggtggtggatgtgtctcacgaggaccccgaagtgaagttcaattggtacgtggacggcgtggaagtgcacaacgccaagaccaagcctagagaggaacagtacaacagcacctacagagtggtgtccgtgctgaccgtgctgcaccaggattggctgaacggcaaagagtacaagtgcaaggtgtccaacaaggccctgcctgctcctatcgagaaaaccatcagcaaggccaagggccagcctagggaaccccaggtttacacccttcctccatgccgggatgagctgaccaagaaccaggtgtccctgtggtgtctcgtgaagggcttctaccccagcgacattgccgtggaatgggagagcaatggccagcctgagaacaactacaagacaacccctcctgtgctggacagcgacggctcattcttcctgtacagcaagctgacagtcgacaagtccagatggcagcagggcaacgtgttcagttgcagcgtgctgcacgaggccctgcacagtcactacacccagaagtccctgagcctgtctcctggatagtga

SEQ ID NO: 681 - DNA, 2247 bp, synthetic construct
  misc_feature 1..2247: note = MX834 A19-46   A23-58H/A23-58L93VGLTG   Hole   DNA with signal peptide
  source 1..2247: mol_type = other DNA
atgggctggtcctgcatcatcctgtttctggtggccacagccaccggtgtgcactctgagatcgtgctgacacagagccctggcacactgtcactgtctccaggcgaaagagccacactgagctgtagagccagccagagcgtgtccagctcttacctggcttggtatcagcagaagcccggacaggctcccagactgctgatctactctgccagcagcagagccacaggcatccccgatagattttctggcagcggctccggcaccgacttcaccctgacaatcagcagactggaacccgaggacttcgccgtgtacttctgtcagcagtacgtgggcctgaccggctggacatttggccagggaacaaaggtggaaatcaagggcggaagctctggcgacatccagatgacacagagccctagcagcgtgtccgcctctgtgggagacagagtgatcatcacctgtagagccagccagggcatcagctcttggctggcttggtatcagcagaagcctggcaaggcccctaaggtgctgatctacgatgccagctctctgcagtctggcgtgcccagcagattttctggcagcggctacggcaccgacttcaccctgaccatatctagcctgcagcctgaggacagcgccacctactattgtcagcaggccaagtctttccccatcaccttcggccagggcaccagactggaaatcaaaggcggcggaggaagcggcggatctggatctggtggcggaggatctgcttctggctctggacaggttcagctggttgaatctggcggaggtgttgtgcagcctggcagatccctgagactgtcttgtgccgcctccggctttaccttcagctcctacgccttccactgggttcgacaagcccctggcaaaggcctggaatgggttgccgtgatcagctacgacggcagcaaccagtactacgccgactccgtgaagggcagattcaccatcagccgggacaacagcaagaacaccctgtacctgcagatgaacagcctgcgggccgatgacaccgctgtgtattattgtgcccgcgacctggccattgccgtggctggaacatggcactactacaacggcatggacgtgtggggccaaggcaccacagtgacagtgtctagtggcggatctagcggccagatgcagctggtgcagtctggccccgaagtgaagaaacctggcaccagcgtgaaggtgtcctgcaaggccagcggcttcacctttacaagctctgccgtgcagtgggtccgacaggcaagaggacaacggctggaatggatcggctggatcgttgtcggcagcggcaacaccaattacgcccagaaattccaagagcgcgtgaccatcaccagagacatgagcaccagcaccgcctacatggaactgagcagcctgagaagcgaggacacagcagtgtactattgcgccgctcctaactgctccaacgtcgtgtgctacgacggcttcgatatctggggccagggaaccatggtcaccgtgtcaagtgcttctggcggctccggagataagacccacacatgtcctccatgtcctgctccagaactgctcggcggcccttctgtgttcctgtttcctccaaagcctaaggacaccctgatgatcagcagaacccctgaagtgacctgcgtggtggtggatgtgtctcacgaggaccccgaagtgaagttcaattggtacgtggacggcgtggaagtgcacaacgccaagaccaagcctagagaggaacagtacaacagcacctacagagtggtgtccgtgctgaccgtgctgcaccaggattggctgaacggcaaagagtacaagtgcaaggtgtccaacaaggccctgcctgctcctatcgagaaaaccatcagcaaggccaagggccagcctagggaaccccaggtttgtacccttcctccaagccgggatgagctgaccaagaaccaggtgtccctgagctgtgccgtgaagggcttctaccccagcgacattgccgtggaatgggagagcaatggccagcctgagaacaactacaagacaacccctcctgtgctggacagcgacggctcattcttcctggtgagcaagctgacagtcgacaagtccagatggcagcagggcaacgtgttcagttgcagcgtgctgcacgaggccctgcacagtcactacacccagaagtccctgagcctgtctcctggatagtga

SEQ ID NO: 682 - DNA, 2190 bp, synthetic construct
  misc_feature 1..2190: note = MX834 A19-46   A23-58H/A23-58L93VGLTG   Hole   DNA without signal peptide
  source 1..2190: mol_type = other DNA
gagatcgtgctgacacagagccctggcacactgtcactgtctccaggcgaaagagccacactgagctgtagagccagccagagcgtgtccagctcttacctggcttggtatcagcagaagcccggacaggctcccagactgctgatctactctgccagcagcagagccacaggcatccccgatagattttctggcagcggctccggcaccgacttcaccctgacaatcagcagactggaacccgaggacttcgccgtgtacttctgtcagcagtacgtgggcctgaccggctggacatttggccagggaacaaaggtggaaatcaagggcggaagctctggcgacatccagatgacacagagccctagcagcgtgtccgcctctgtgggagacagagtgatcatcacctgtagagccagccagggcatcagctcttggctggcttggtatcagcagaagcctggcaaggcccctaaggtgctgatctacgatgccagctctctgcagtctggcgtgcccagcagattttctggcagcggctacggcaccgacttcaccctgaccatatctagcctgcagcctgaggacagcgccacctactattgtcagcaggccaagtctttccccatcaccttcggccagggcaccagactggaaatcaaaggcggcggaggaagcggcggatctggatctggtggcggaggatctgcttctggctctggacaggttcagctggttgaatctggcggaggtgttgtgcagcctggcagatccctgagactgtcttgtgccgcctccggctttaccttcagctcctacgccttccactgggttcgacaagcccctggcaaaggcctggaatgggttgccgtgatcagctacgacggcagcaaccagtactacgccgactccgtgaagggcagattcaccatcagccgggacaacagcaagaacaccctgtacctgcagatgaacagcctgcgggccgatgacaccgctgtgtattattgtgcccgcgacctggccattgccgtggctggaacatggcactactacaacggcatggacgtgtggggccaaggcaccacagtgacagtgtctagtggcggatctagcggccagatgcagctggtgcagtctggccccgaagtgaagaaacctggcaccagcgtgaaggtgtcctgcaaggccagcggcttcacctttacaagctctgccgtgcagtgggtccgacaggcaagaggacaacggctggaatggatcggctggatcgttgtcggcagcggcaacaccaattacgcccagaaattccaagagcgcgtgaccatcaccagagacatgagcaccagcaccgcctacatggaactgagcagcctgagaagcgaggacacagcagtgtactattgcgccgctcctaactgctccaacgtcgtgtgctacgacggcttcgatatctggggccagggaaccatggtcaccgtgtcaagtgcttctggcggctccggagataagacccacacatgtcctccatgtcctgctccagaactgctcggcggcccttctgtgttcctgtttcctccaaagcctaaggacaccctgatgatcagcagaacccctgaagtgacctgcgtggtggtggatgtgtctcacgaggaccccgaagtgaagttcaattggtacgtggacggcgtggaagtgcacaacgccaagaccaagcctagagaggaacagtacaacagcacctacagagtggtgtccgtgctgaccgtgctgcaccaggattggctgaacggcaaagagtacaagtgcaaggtgtccaacaaggccctgcctgctcctatcgagaaaaccatcagcaaggccaagggccagcctagggaaccccaggtttgtacccttcctccaagccgggatgagctgaccaagaaccaggtgtccctgagctgtgccgtgaagggcttctaccccagcgacattgccgtggaatgggagagcaatggccagcctgagaacaactacaagacaacccctcctgtgctggacagcgacggctcattcttcctggtgagcaagctgacagtcgacaagtccagatggcagcagggcaacgtgttcagttgcagcgtgctgcacgaggccctgcacagtcactacacccagaagtccctgagcctgtctcctggatagtga

SEQ ID NO: 683 - DNA, 2253 bp, synthetic construct
  misc_feature 1..2253: note = MX835 A19-46   A23-58H/A23-58L94GLTG / A23-58H/A23-58L94GLTG   A19-61   Knob   DNA   with signal peptide
  source 1..2253: mol_type = other DNA
atgggctggtcctgcatcatcctgtttctggtggccacagccaccggtgtgcactctcagaccgtggtcacacaagagcctagctttagcgtgtcccctggcggcacagtgacactgacatgtggactttctagcggatctgtgtccaccgcctactttcccagctggtatcaacagaccccaggccaggcacctcggacactgatctacggcaccaacacaagatccagcggcgtgcccgataggttcagcggatctatcctgggcaacaaggccgcactgactatcacaggcgcccaggccgatgacgagagcgattactactgcgtgctgtacatgggcagaggcatcgtggtttttggcggaggcaccaagctgacagtgcttggcggatctagcggcgagatcgtgctgacacagagccctggcacactgtcactgtctccaggcgaaagagccacactgagctgtagagccagccagagcgtgtccagctcttacctggcttggtatcagcagaagcccggacaggctcccagactgctgatctactctgccagcagcagagccacaggcatccccgatagattttctggcagcggctccggcaccgacttcaccctgacaatcagcagactggaacccgaggacttcgccgtgtacttctgtcagcagtacggcggcctgaccggctggacatttggacagggaacaaaggtggaaatcaagggaggcggaggatctggcggatctggaagtggtggcggtggatctgcttctggctctggacaaatgcagctcgttcagagcggccctgaagtgaagaaacctggcacctccgtgaaggtgtcctgcaaggccagcggcttcacctttacaagctctgccgtgcagtgggttcgacaagctagaggccagagactggaatggatcggctggatcgttgtcggcagcggcaacaccaattacgcccagaaattccaagagcgcgtgaccatcaccagagacatgagcaccagcacagcctacatggaactgagcagtctgcgcagcgaagataccgctgtgtactattgtgccgctcctaactgcagcaacgtcgtgtgctacgatggcttcgacatctggggacagggcacaatggtcaccgtgtcctctggcggaagtagcggccaggtgcagctggttgaatctggtggcggagttgtgcagcctggcagaagcctgagactgtcttgtgccgcctctggctttaccctgagcagctatggcatgcactgggtccgacaggcccctggcaaaggacttgaatgggtcgccgtgatcagctacgacggcagcaacaagtactacgtggacagcgtgaagggcagattcaccatcagccgggacaacagcaagaacaccctgtacctgcagatgaacagcctgagagccgaggacacagccgtgtattattgcgccagaggctgggcctattgggagctgctgcctgactactactacggcatggatgtgtggggccagggaaccacagtgaccgtgtctagcgcttctggcggctccggagataagacccacacatgtcctccatgtcctgctccagaactgctcggcggcccttctgtgttcctgtttcctccaaagcctaaggacaccctgatgatcagcagaacccctgaagtgacctgcgtggtggtggatgtgtctcacgaggaccccgaagtgaagttcaattggtacgtggacggcgtggaagtgcacaacgccaagaccaagcctagagaggaacagtacaacagcacctacagagtggtgtccgtgctgaccgtgctgcaccaggattggctgaacggcaaagagtacaagtgcaaggtgtccaacaaggccctgcctgctcctatcgagaaaaccatcagcaaggccaagggccagcctagggaaccccaggtttacacccttcctccatgccgggatgagctgaccaagaaccaggtgtccctgtggtgtctcgtgaagggcttctaccccagcgacattgccgtggaatgggagagcaatggccagcctgagaacaactacaagacaacccctcctgtgctggacagcgacggctcattcttcctgtacagcaagctgacagtcgacaagtccagatggcagcagggcaacgtgttcagttgcagcgtgctgcacgaggccctgcacagtcactacacccagaagtccctgagcctgtctcctggatagtga

SEQ ID NO: 684 - DNA, 2196 bp, synthetic construct
  misc_feature 1..2196: note = MX835 A19-46   A23-58H/A23-58L94GLTG / A23-58H/A23-58L94GLTG   A19-61   Knob   DNA   without signal peptide
  source 1..2196: mol_type = other DNA
cagaccgtggtcacacaagagcctagctttagcgtgtcccctggcggcacagtgacactgacatgtggactttctagcggatctgtgtccaccgcctactttcccagctggtatcaacagaccccaggccaggcacctcggacactgatctacggcaccaacacaagatccagcggcgtgcccgataggttcagcggatctatcctgggcaacaaggccgcactgactatcacaggcgcccaggccgatgacgagagcgattactactgcgtgctgtacatgggcagaggcatcgtggtttttggcggaggcaccaagctgacagtgcttggcggatctagcggcgagatcgtgctgacacagagccctggcacactgtcactgtctccaggcgaaagagccacactgagctgtagagccagccagagcgtgtccagctcttacctggcttggtatcagcagaagcccggacaggctcccagactgctgatctactctgccagcagcagagccacaggcatccccgatagattttctggcagcggctccggcaccgacttcaccctgacaatcagcagactggaacccgaggacttcgccgtgtacttctgtcagcagtacggcggcctgaccggctggacatttggacagggaacaaaggtggaaatcaagggaggcggaggatctggcggatctggaagtggtggcggtggatctgcttctggctctggacaaatgcagctcgttcagagcggccctgaagtgaagaaacctggcacctccgtgaaggtgtcctgcaaggccagcggcttcacctttacaagctctgccgtgcagtgggttcgacaagctagaggccagagactggaatggatcggctggatcgttgtcggcagcggcaacaccaattacgcccagaaattccaagagcgcgtgaccatcaccagagacatgagcaccagcacagcctacatggaactgagcagtctgcgcagcgaagataccgctgtgtactattgtgccgctcctaactgcagcaacgtcgtgtgctacgatggcttcgacatctggggacagggcacaatggtcaccgtgtcctctggcggaagtagcggccaggtgcagctggttgaatctggtggcggagttgtgcagcctggcagaagcctgagactgtcttgtgccgcctctggctttaccctgagcagctatggcatgcactgggtccgacaggcccctggcaaaggacttgaatgggtcgccgtgatcagctacgacggcagcaacaagtactacgtggacagcgtgaagggcagattcaccatcagccgggacaacagcaagaacaccctgtacctgcagatgaacagcctgagagccgaggacacagccgtgtattattgcgccagaggctgggcctattgggagctgctgcctgactactactacggcatggatgtgtggggccagggaaccacagtgaccgtgtctagcgcttctggcggctccggagataagacccacacatgtcctccatgtcctgctccagaactgctcggcggcccttctgtgttcctgtttcctccaaagcctaaggacaccctgatgatcagcagaacccctgaagtgacctgcgtggtggtggatgtgtctcacgaggaccccgaagtgaagttcaattggtacgtggacggcgtggaagtgcacaacgccaagaccaagcctagagaggaacagtacaacagcacctacagagtggtgtccgtgctgaccgtgctgcaccaggattggctgaacggcaaagagtacaagtgcaaggtgtccaacaaggccctgcctgctcctatcgagaaaaccatcagcaaggccaagggccagcctagggaaccccaggtttacacccttcctccatgccgggatgagctgaccaagaaccaggtgtccctgtggtgtctcgtgaagggcttctaccccagcgacattgccgtggaatgggagagcaatggccagcctgagaacaactacaagacaacccctcctgtgctggacagcgacggctcattcttcctgtacagcaagctgacagtcgacaagtccagatggcagcagggcaacgtgttcagttgcagcgtgctgcacgaggccctgcacagtcactacacccagaagtccctgagcctgtctcctggatagtga

SEQ ID NO: 685 - DNA, 2247 bp, synthetic construct
  misc_feature 1..2247: note = MX835 A19-46   A23-58H/A23-58L94GLTG / A23-58H/A23-58L94GLTG   A19-61   Hole   DNA   with signal peptide
  source 1..2247: mol_type = other DNA
atgggctggtcctgcatcatcctgtttctggtggccacagccaccggtgtgcactctgagatcgtgctgacacagagccctggcacactgtcactgtctccaggcgaaagagccacactgagctgtagagccagccagagcgtgtccagctcttacctggcttggtatcagcagaagcccggacaggctcccagactgctgatctactctgccagcagcagagccacaggcatccccgatagattttctggcagcggctccggcaccgacttcaccctgacaatcagcagactggaacccgaggacttcgccgtgtacttctgtcagcagtacggcggcctgaccggctggacatttggacagggaacaaaggtggaaatcaagggcggaagctctggcgacatccagatgacacagagccctagcagcgtgtccgcctctgtgggagacagagtgatcatcacctgtagagccagccagggcatcagctcttggctggcttggtatcagcagaagcctggcaaggcccctaaggtgctgatctacgatgccagctctctgcagtctggcgtgcccagcagattttctggcagcggctacggcaccgacttcaccctgaccatatctagcctgcagcctgaggacagcgccacctactattgtcagcaggccaagtctttccccatcaccttcggccagggcaccagactggaaatcaaaggcggcggaggaagcggcggatctggatctggtggcggaggatctgcttctggctctggacaggttcagctggttgaatctggcggaggtgttgtgcagcctggcagatccctgagactgtcttgtgccgcctccggctttaccttcagctcctacgccttccactgggttcgacaagcccctggcaaaggcctggaatgggttgccgtgatcagctacgacggcagcaaccagtactacgccgactccgtgaagggcagattcaccatcagccgggacaacagcaagaacaccctgtacctgcagatgaacagcctgcgggccgatgacaccgctgtgtattattgtgcccgcgacctggccattgccgtggctggaacatggcactactacaacggcatggacgtgtggggccaaggcaccacagtgacagtgtctagtggcggatctagcggccagatgcagctggtgcagtctggccccgaagtgaagaaacctggcaccagcgtgaaggtgtcctgcaaggccagcggcttcacctttacaagctctgccgtgcagtgggtccgacaggcaagaggacaacggctggaatggatcggctggatcgttgtcggcagcggcaacaccaattacgcccagaaattccaagagcgcgtgaccatcaccagagacatgagcaccagcaccgcctacatggaactgagcagcctgagaagcgaggacacagcagtgtactattgcgccgctcctaactgctccaacgtcgtgtgctacgacggcttcgatatctggggccagggaaccatggtcaccgtgtcaagtgcttctggcggctccggagataagacccacacatgtcctccatgtcctgctccagaactgctcggcggcccttctgtgttcctgtttcctccaaagcctaaggacaccctgatgatcagcagaacccctgaagtgacctgcgtggtggtggatgtgtctcacgaggaccccgaagtgaagttcaattggtacgtggacggcgtggaagtgcacaacgccaagaccaagcctagagaggaacagtacaacagcacctacagagtggtgtccgtgctgaccgtgctgcaccaggattggctgaacggcaaagagtacaagtgcaaggtgtccaacaaggccctgcctgctcctatcgagaaaaccatcagcaaggccaagggccagcctagggaaccccaggtttgtacccttcctccaagccgggatgagctgaccaagaaccaggtgtccctgagctgtgccgtgaagggcttctaccccagcgacattgccgtggaatgggagagcaatggccagcctgagaacaactacaagacaacccctcctgtgctggacagcgacggctcattcttcctggtgagcaagctgacagtcgacaagtccagatggcagcagggcaacgtgttcagttgcagcgtgctgcacgaggccctgcacagtcactacacccagaagtccctgagcctgtctcctggatagtga

SEQ ID NO: 686 - DNA, 2190 bp, synthetic construct
  misc_feature 1..2190: note = MX835 A19-46   A23-58H/A23-58L94GLTG / A23-58H/A23-58L94GLTG   A19-61   Hole   DNA   without signal peptide
  source 1..2190: mol_type = other DNA
gagatcgtgctgacacagagccctggcacactgtcactgtctccaggcgaaagagccacactgagctgtagagccagccagagcgtgtccagctcttacctggcttggtatcagcagaagcccggacaggctcccagactgctgatctactctgccagcagcagagccacaggcatccccgatagattttctggcagcggctccggcaccgacttcaccctgacaatcagcagactggaacccgaggacttcgccgtgtacttctgtcagcagtacggcggcctgaccggctggacatttggacagggaacaaaggtggaaatcaagggcggaagctctggcgacatccagatgacacagagccctagcagcgtgtccgcctctgtgggagacagagtgatcatcacctgtagagccagccagggcatcagctcttggctggcttggtatcagcagaagcctggcaaggcccctaaggtgctgatctacgatgccagctctctgcagtctggcgtgcccagcagattttctggcagcggctacggcaccgacttcaccctgaccatatctagcctgcagcctgaggacagcgccacctactattgtcagcaggccaagtctttccccatcaccttcggccagggcaccagactggaaatcaaaggcggcggaggaagcggcggatctggatctggtggcggaggatctgcttctggctctggacaggttcagctggttgaatctggcggaggtgttgtgcagcctggcagatccctgagactgtcttgtgccgcctccggctttaccttcagctcctacgccttccactgggttcgacaagcccctggcaaaggcctggaatgggttgccgtgatcagctacgacggcagcaaccagtactacgccgactccgtgaagggcagattcaccatcagccgggacaacagcaagaacaccctgtacctgcagatgaacagcctgcgggccgatgacaccgctgtgtattattgtgcccgcgacctggccattgccgtggctggaacatggcactactacaacggcatggacgtgtggggccaaggcaccacagtgacagtgtctagtggcggatctagcggccagatgcagctggtgcagtctggccccgaagtgaagaaacctggcaccagcgtgaaggtgtcctgcaaggccagcggcttcacctttacaagctctgccgtgcagtgggtccgacaggcaagaggacaacggctggaatggatcggctggatcgttgtcggcagcggcaacaccaattacgcccagaaattccaagagcgcgtgaccatcaccagagacatgagcaccagcaccgcctacatggaactgagcagcctgagaagcgaggacacagcagtgtactattgcgccgctcctaactgctccaacgtcgtgtgctacgacggcttcgatatctggggccagggaaccatggtcaccgtgtcaagtgcttctggcggctccggagataagacccacacatgtcctccatgtcctgctccagaactgctcggcggcccttctgtgttcctgtttcctccaaagcctaaggacaccctgatgatcagcagaacccctgaagtgacctgcgtggtggtggatgtgtctcacgaggaccccgaagtgaagttcaattggtacgtggacggcgtggaagtgcacaacgccaagaccaagcctagagaggaacagtacaacagcacctacagagtggtgtccgtgctgaccgtgctgcaccaggattggctgaacggcaaagagtacaagtgcaaggtgtccaacaaggccctgcctgctcctatcgagaaaaccatcagcaaggccaagggccagcctagggaaccccaggtttgtacccttcctccaagccgggatgagctgaccaagaaccaggtgtccctgagctgtgccgtgaagggcttctaccccagcgacattgccgtggaatgggagagcaatggccagcctgagaacaactacaagacaacccctcctgtgctggacagcgacggctcattcttcctggtgagcaagctgacagtcgacaagtccagatggcagcagggcaacgtgttcagttgcagcgtgctgcacgaggccctgcacagtcactacacccagaagtccctgagcctgtctcctggatagtga

SEQ ID NO: 687 - DNA, 2253 bp, synthetic construct; identical to SEQ ID NO: 679
  misc_feature 1..2253: note = MX837 A19-46   A23-58H/A23-58L93VGLTG / A19-61   A23- 58H/A23-58L93VGLTG   Knob   DNA   with signal peptide
  source 1..2253: mol_type = other DNA

SEQ ID NO: 688 - DNA, 2196 bp, synthetic construct; identical to SEQ ID NO: 680
  misc_feature 1..2196: note = MX837 A19-46   A23-58H/A23-58L93VGLTG / A19-61   A23- 58H/A23-58L93VGLTG   Knob   DNA   without signal peptide
  source 1..2196: mol_type = other DNA

SEQ ID NO: 689 - DNA, 2247 bp, synthetic construct
  misc_feature 1..2247: note = MX837 A19-46   A23-58H/A23-58L93VGLTG / A19-61   A23- 58H/A23-58L93VGLTG   Hole   DNA   with signal peptide
  source 1..2247: mol_type = other DNA
atgggctggtcctgcatcatcctgtttctggtggccacagccaccggtgtgcactctgacatccagatgacacagagccctagcagcgtgtccgcctctgtgggagacagagtgatcatcacctgtagagccagccagggcatcagctcttggctggcttggtatcagcagaagcctggcaaggcccctaaggtgctgatctacgatgccagctctctgcagtctggcgtgcccagcagattttctggcagcggctacggcaccgacttcaccctgaccatatctagcctgcagcctgaggacagcgccacctactattgtcagcaggccaagtctttccccatcaccttcggccagggcaccagactggaaatcaaaggcggaagctctggcgagatcgtgctgacacagagccctggcacactgtcactgtctccaggcgaaagagccacactgagctgtagagccagccagagcgtgtccagctcttacctggcttggtatcagcagaagcccggacaggctcccagactgctgatctactctgccagcagcagagccacaggcatccccgatagattttctggcagcggctccggcaccgacttcaccctgacaatcagcagactggaacccgaggacttcgccgtgtacttctgtcagcagtacgtgggcctgaccggctggacatttggccagggaacaaaggtggaaatcaagggcggcggaggaagcggcggatctggatctggtggcggaggatctgcttctggctctggacagatgcagctggtgcagtctggccccgaagtgaagaaacctggcaccagcgtgaaggtgtcctgcaaggccagcggcttcacctttacaagctctgccgtgcagtgggtccgacaggcaagaggacaacggctggaatggatcggctggatcgttgtcggcagcggcaacaccaattacgcccagaaattccaagagcgcgtgaccatcaccagagacatgagcaccagcaccgcctacatggaactgagcagcctgagaagcgaggacacagcagtgtactattgcgccgctcctaactgctccaacgtcgtgtgctacgacggcttcgatatctggggccagggaaccatggtcaccgtgtcaagtggcggatctagcggccaggttcagctggttgaatctggcggaggtgttgtgcagcctggcagatccctgagactgtcttgtgccgcctccggctttaccttcagctcctacgccttccactgggttcgacaagcccctggcaaaggcctggaatgggttgccgtgatcagctacgacggcagcaaccagtactacgccgactccgtgaagggcagattcaccatcagccgggacaacagcaagaacaccctgtacctgcagatgaacagcctgcgggccgatgacaccgctgtgtattattgtgcccgcgacctggccattgccgtggctggaacatggcactactacaacggcatggacgtgtggggccaaggcaccacagtgacagtgtctagtgcttctggcggctccggagataagacccacacatgtcctccatgtcctgctccagaactgctcggcggcccttctgtgttcctgtttcctccaaagcctaaggacaccctgatgatcagcagaacccctgaagtgacctgcgtggtggtggatgtgtctcacgaggaccccgaagtgaagttcaattggtacgtggacggcgtggaagtgcacaacgccaagaccaagcctagagaggaacagtacaacagcacctacagagtggtgtccgtgctgaccgtgctgcaccaggattggctgaacggcaaagagtacaagtgcaaggtgtccaacaaggccctgcctgctcctatcgagaaaaccatcagcaaggccaagggccagcctagggaaccccaggtttgtacccttcctccaagccgggatgagctgaccaagaaccaggtgtccctgagctgtgccgtgaagggcttctaccccagcgacattgccgtggaatgggagagcaatggccagcctgagaacaactacaagacaacccctcctgtgctggacagcgacggctcattcttcctggtgagcaagctgacagtcgacaagtccagatggcagcagggcaacgtgttcagttgcagcgtgctgcacgaggccctgcacagtcactacacccagaagtccctgagcctgtctcctggatagtga

SEQ ID NO: 690 - DNA, 2190 bp, synthetic construct
  misc_feature 1..2190: note = MX837 A19-46   A23-58H/A23-58L93VGLTG / A19-61   A23- 58H/A23-58L93VGLTG   Hole   DNA   without signal peptide
  source 1..2190: mol_type = other DNA
gacatccagatgacacagagccctagcagcgtgtccgcctctgtgggagacagagtgatcatcacctgtagagccagccagggcatcagctcttggctggcttggtatcagcagaagcctggcaaggcccctaaggtgctgatctacgatgccagctctctgcagtctggcgtgcccagcagattttctggcagcggctacggcaccgacttcaccctgaccatatctagcctgcagcctgaggacagcgccacctactattgtcagcaggccaagtctttccccatcaccttcggccagggcaccagactggaaatcaaaggcggaagctctggcgagatcgtgctgacacagagccctggcacactgtcactgtctccaggcgaaagagccacactgagctgtagagccagccagagcgtgtccagctcttacctggcttggtatcagcagaagcccggacaggctcccagactgctgatctactctgccagcagcagagccacaggcatccccgatagattttctggcagcggctccggcaccgacttcaccctgacaatcagcagactggaacccgaggacttcgccgtgtacttctgtcagcagtacgtgggcctgaccggctggacatttggccagggaacaaaggtggaaatcaagggcggcggaggaagcggcggatctggatctggtggcggaggatctgcttctggctctggacagatgcagctggtgcagtctggccccgaagtgaagaaacctggcaccagcgtgaaggtgtcctgcaaggccagcggcttcacctttacaagctctgccgtgcagtgggtccgacaggcaagaggacaacggctggaatggatcggctggatcgttgtcggcagcggcaacaccaattacgcccagaaattccaagagcgcgtgaccatcaccagagacatgagcaccagcaccgcctacatggaactgagcagcctgagaagcgaggacacagcagtgtactattgcgccgctcctaactgctccaacgtcgtgtgctacgacggcttcgatatctggggccagggaaccatggtcaccgtgtcaagtggcggatctagcggccaggttcagctggttgaatctggcggaggtgttgtgcagcctggcagatccctgagactgtcttgtgccgcctccggctttaccttcagctcctacgccttccactgggttcgacaagcccctggcaaaggcctggaatgggttgccgtgatcagctacgacggcagcaaccagtactacgccgactccgtgaagggcagattcaccatcagccgggacaacagcaagaacaccctgtacctgcagatgaacagcctgcgggccgatgacaccgctgtgtattattgtgcccgcgacctggccattgccgtggctggaacatggcactactacaacggcatggacgtgtggggccaaggcaccacagtgacagtgtctagtgcttctggcggctccggagataagacccacacatgtcctccatgtcctgctccagaactgctcggcggcccttctgtgttcctgtttcctccaaagcctaaggacaccctgatgatcagcagaacccctgaagtgacctgcgtggtggtggatgtgtctcacgaggaccccgaagtgaagttcaattggtacgtggacggcgtggaagtgcacaacgccaagaccaagcctagagaggaacagtacaacagcacctacagagtggtgtccgtgctgaccgtgctgcaccaggattggctgaacggcaaagagtacaagtgcaaggtgtccaacaaggccctgcctgctcctatcgagaaaaccatcagcaaggccaagggccagcctagggaaccccaggtttgtacccttcctccaagccgggatgagctgaccaagaaccaggtgtccctgagctgtgccgtgaagggcttctaccccagcgacattgccgtggaatgggagagcaatggccagcctgagaacaactacaagacaacccctcctgtgctggacagcgacggctcattcttcctggtgagcaagctgacagtcgacaagtccagatggcagcagggcaacgtgttcagttgcagcgtgctgcacgaggccctgcacagtcactacacccagaagtccctgagcctgtctcctggatagtga

SEQ ID NO: 691 - DNA, 2253 bp, synthetic construct; identical to SEQ ID NO: 683
  misc_feature 1..2253: note = MX838 A19-46   A23-58H/A23-58L94GLTG / A19-61   A23-5 8H/A23-58L94GLTG   Knob   DNA   with signal peptide
  source 1..2253: mol_type = other DNA

SEQ ID NO: 692 - DNA, 2196 bp, synthetic construct; identical to SEQ ID NO: 684
  misc_feature 1..2196: note = MX838 A19-46   A23-58H/A23-58L94GLTG / A19-61   A23-5 8H/A23-58L94GLTG   Knob   DNA   without signal peptide
  source 1..2196: mol_type = other DNA

SEQ ID NO: 693 - DNA, 2247 bp, synthetic construct
  misc_feature 1..2247: note = MX838 A19-46   A23-58H/A23-58L94GLTG / A19-61   A23-5 8H/A23-58L94GLTG   Hole   DNA   with signal peptide
  source 1..2247: mol_type = other DNA
atgggctggtcctgcatcatcctgtttctggtggccacagccaccggtgtgcactctgacatccagatgacacagagccctagcagcgtgtccgcctctgtgggagacagagtgatcatcacctgtagagccagccagggcatcagctcttggctggcttggtatcagcagaagcctggcaaggcccctaaggtgctgatctacgatgccagctctctgcagtctggcgtgcccagcagattttctggcagcggctacggcaccgacttcaccctgaccatatctagcctgcagcctgaggacagcgccacctactattgtcagcaggccaagtctttccccatcaccttcggccagggcaccagactggaaatcaaaggcggaagctctggcgagatcgtgctgacacagagccctggcacactgtcactgtctccaggcgaaagagccacactgagctgtagagccagccagagcgtgtccagctcttacctggcttggtatcagcagaagcccggacaggctcccagactgctgatctactctgccagcagcagagccacaggcatccccgatagattttctggcagcggctccggcaccgacttcaccctgacaatcagcagactggaacccgaggacttcgccgtgtacttctgtcagcagtacggcggcctgaccggctggacatttggacagggaacaaaggtggaaatcaagggcggcggaggaagcggcggatctggatctggtggcggaggatctgcttctggctctggacagatgcagctggtgcagtctggccccgaagtgaagaaacctggcaccagcgtgaaggtgtcctgcaaggccagcggcttcacctttacaagctctgccgtgcagtgggtccgacaggcaagaggacaacggctggaatggatcggctggatcgttgtcggcagcggcaacaccaattacgcccagaaattccaagagcgcgtgaccatcaccagagacatgagcaccagcaccgcctacatggaactgagcagcctgagaagcgaggacacagcagtgtactattgcgccgctcctaactgctccaacgtcgtgtgctacgacggcttcgatatctggggccagggaaccatggtcaccgtgtcaagtggcggatctagcggccaggttcagctggttgaatctggcggaggtgttgtgcagcctggcagatccctgagactgtcttgtgccgcctccggctttaccttcagctcctacgccttccactgggttcgacaagcccctggcaaaggcctggaatgggttgccgtgatcagctacgacggcagcaaccagtactacgccgactccgtgaagggcagattcaccatcagccgggacaacagcaagaacaccctgtacctgcagatgaacagcctgcgggccgatgacaccgctgtgtattattgtgcccgcgacctggccattgccgtggctggaacatggcactactacaacggcatggacgtgtggggccaaggcaccacagtgacagtgtctagtgcttctggcggctccggagataagacccacacatgtcctccatgtcctgctccagaactgctcggcggcccttctgtgttcctgtttcctccaaagcctaaggacaccctgatgatcagcagaacccctgaagtgacctgcgtggtggtggatgtgtctcacgaggaccccgaagtgaagttcaattggtacgtggacggcgtggaagtgcacaacgccaagaccaagcctagagaggaacagtacaacagcacctacagagtggtgtccgtgctgaccgtgctgcaccaggattggctgaacggcaaagagtacaagtgcaaggtgtccaacaaggccctgcctgctcctatcgagaaaaccatcagcaaggccaagggccagcctagggaaccccaggtttgtacccttcctccaagccgggatgagctgaccaagaaccaggtgtccctgagctgtgccgtgaagggcttctaccccagcgacattgccgtggaatgggagagcaatggccagcctgagaacaactacaagacaacccctcctgtgctggacagcgacggctcattcttcctggtgagcaagctgacagtcgacaagtccagatggcagcagggcaacgtgttcagttgcagcgtgctgcacgaggccctgcacagtcactacacccagaagtccctgagcctgtctcctggatagtga

SEQ ID NO: 694 - DNA, 2190 bp, synthetic construct
  misc_feature 1..2190: note = MX838 A19-46   A23-58H/A23-58L94GLTG / A19-61   A23-5 8H/A23-58L94GLTG   Hole   DNA   without signal peptide
  source 1..2190: mol_type = other DNA
gacatccagatgacacagagccctagcagcgtgtccgcctctgtgggagacagagtgatcatcacctgtagagccagccagggcatcagctcttggctggcttggtatcagcagaagcctggcaaggcccctaaggtgctgatctacgatgccagctctctgcagtctggcgtgcccagcagattttctggcagcggctacggcaccgacttcaccctgaccatatctagcctgcagcctgaggacagcgccacctactattgtcagcaggccaagtctttccccatcaccttcggccagggcaccagactggaaatcaaaggcggaagctctggcgagatcgtgctgacacagagccctggcacactgtcactgtctccaggcgaaagagccacactgagctgtagagccagccagagcgtgtccagctcttacctggcttggtatcagcagaagcccggacaggctcccagactgctgatctactctgccagcagcagagccacaggcatccccgatagattttctggcagcggctccggcaccgacttcaccctgacaatcagcagactggaacccgaggacttcgccgtgtacttctgtcagcagtacggcggcctgaccggctggacatttggacagggaacaaaggtggaaatcaagggcggcggaggaagcggcggatctggatctggtggcggaggatctgcttctggctctggacagatgcagctggtgcagtctggccccgaagtgaagaaacctggcaccagcgtgaaggtgtcctgcaaggccagcggcttcacctttacaagctctgccgtgcagtgggtccgacaggcaagaggacaacggctggaatggatcggctggatcgttgtcggcagcggcaacaccaattacgcccagaaattccaagagcgcgtgaccatcaccagagacatgagcaccagcaccgcctacatggaactgagcagcctgagaagcgaggacacagcagtgtactattgcgccgctcctaactgctccaacgtcgtgtgctacgacggcttcgatatctggggccagggaaccatggtcaccgtgtcaagtggcggatctagcggccaggttcagctggttgaatctggcggaggtgttgtgcagcctggcagatccctgagactgtcttgtgccgcctccggctttaccttcagctcctacgccttccactgggttcgacaagcccctggcaaaggcctggaatgggttgccgtgatcagctacgacggcagcaaccagtactacgccgactccgtgaagggcagattcaccatcagccgggacaacagcaagaacaccctgtacctgcagatgaacagcctgcgggccgatgacaccgctgtgtattattgtgcccgcgacctggccattgccgtggctggaacatggcactactacaacggcatggacgtgtggggccaaggcaccacagtgacagtgtctagtgcttctggcggctccggagataagacccacacatgtcctccatgtcctgctccagaactgctcggcggcccttctgtgttcctgtttcctccaaagcctaaggacaccctgatgatcagcagaacccctgaagtgacctgcgtggtggtggatgtgtctcacgaggaccccgaagtgaagttcaattggtacgtggacggcgtggaagtgcacaacgccaagaccaagcctagagaggaacagtacaacagcacctacagagtggtgtccgtgctgaccgtgctgcaccaggattggctgaacggcaaagagtacaagtgcaaggtgtccaacaaggccctgcctgctcctatcgagaaaaccatcagcaaggccaagggccagcctagggaaccccaggtttgtacccttcctccaagccgggatgagctgaccaagaaccaggtgtccctgagctgtgccgtgaagggcttctaccccagcgacattgccgtggaatgggagagcaatggccagcctgagaacaactacaagacaacccctcctgtgctggacagcgacggctcattcttcctggtgagcaagctgacagtcgacaagtccagatggcagcagggcaacgtgttcagttgcagcgtgctgcacgaggccctgcacagtcactacacccagaagtccctgagcctgtctcctggatagtga

SEQ ID NO: 695 - RNA, 2244 nt, synthetic construct
  misc_feature 1..2244: note = MX412 A23-58H/B1-182L   A19-61 mRNA   with signal peptide
  source 1..2244: mol_type = other RNA
atgggctggagctgtatcatcctctttttagtggcaactgccaccggagtccatagcgagatcgtgctgacacaaagtccggggactttaagtctcagcccgggggaacgcgcaaccctctcctgccgtgcctctcaaagcgttagctccagttacctggcttggtaccagcagaagcccggtcaggcccctcggctgctgatctacggggcctcatctcgcgccaccggattcccagatagatttagtggatcagggtctgggacagacttcaccctgactattagtcggttggagcccgaggactttgccgtttattactgccagcaatatggcaactctccttggaccttcggccaggggaccaaagtagagatacgcggaggatctagcggtgatatacagatgacccagtccccctcgtcagttagtgcgagcgtaggtgatagggtgattatcacttgccgcgcctctcagggcattagcagttggcttgcttggtatcagcagaagcccggaaaagcaccgaaggttctcatatacgacgctagctctctgcagagcggggtcccgtctagattttctggatcgggctacggcactgacttcacactgaccatttcaagtctgcagcctgaggatagcgccacttattactgtcagcaagccaagtccttccccattaccttcgggcagggcactcggctcgagatcaaaggcggcggtgggtcaggcgggtccgggtcagggggaggaggttcagcatccggctctggtcaggtgcagctggtggagtccggcggcggtgtagtgcaaccagggcgaagcctgagattgtcgtgtgccgcttctggatttacattctccagttacgcttttcattgggtgagacaagccccaggcaaaggccttgagtgggtcgcggtgatttcatacgatgggagcaatcaatattatgcggatagcgtgaagggtaggttcaccatctctagggataatagtaaaaataccttgtatctgcagatgaactcccttcgggcagacgataccgcggtttattactgtgccagggacctggccattgcagtagctgggacctggcattactacaatggcatggacgtatggggccagggaactacagtaacagtctcctcaggaggaagctctggtcagatgcaactggtgcagagcggaccagaggtgaaaaaaccaggcaccagtgtcaaggtcagctgcaaggctagcgggttcacgtttacctcgtcagccgttcagtgggtgcgtcaggctcggggtcaaaggctggaatggataggctggattgtggtcggaagtggaaatacaaattatgcccaaaaattccaagaacgcgtcaccatcacgagagacatgtccaccagtacagcttacatggaactgtccagcctacgaagtgaagacacagctgtgtattattgcgcagcgcccaattgctccaacgttgtctgttacgacgggtttgatatctggggtcagggaacgatggtgactgtgtctagcgcctcaggaggctcaggcgacaaaacacatacttgccctccttgtcccgctccagagctcctgggcggcccatcagtttttttgtttccacccaaaccgaaggacactctgatgatcagccgaacgccagaagtcacatgtgtcgtggtggacgttagccacgaagatcctgaggtaaaatttaactggtacgtggacggtgtcgaggtgcacaacgcaaaaacaaaacctagggaagaacagtacaacagcacgtacagagtcgtgtcagttttgaccgtgctacaccaggattggcttaatgggaaggagtataaatgcaaggtgtccaacaaggctctacctgcacccattgagaagactatctccaaggccaagggccaaccacgggaacctcaggtctacaccctccctcccagtcgcgatgaactcactaagaaccaggtttctttgacatgccttgtgaaaggcttctatccatccgatatcgcagtcgagtgggagagcaacggccagcctgagaacaattataagacaaccccccccgtgctggattccgacgggtccttcttcctgtacagcaagctaacggtggacaagtctcgatggcagcaggggaacgtgttctcctgttcggtgcttcacgaagccctccactcccactatacacagaagtccttatcactctcccccggatagtga

SEQ ID NO: 696 - RNA, 2187 nt, synthetic construct
  misc_feature 1..2187: note = MX412 A23-58H/B1-182L   A19-61 mRNA   without signal peptide
  source 1..2187: mol_type = other RNA
gagatcgtgctgacacaaagtccggggactttaagtctcagcccgggggaacgcgcaaccctctcctgccgtgcctctcaaagcgttagctccagttacctggcttggtaccagcagaagcccggtcaggcccctcggctgctgatctacggggcctcatctcgcgccaccggattcccagatagatttagtggatcagggtctgggacagacttcaccctgactattagtcggttggagcccgaggactttgccgtttattactgccagcaatatggcaactctccttggaccttcggccaggggaccaaagtagagatacgcggaggatctagcggtgatatacagatgacccagtccccctcgtcagttagtgcgagcgtaggtgatagggtgattatcacttgccgcgcctctcagggcattagcagttggcttgcttggtatcagcagaagcccggaaaagcaccgaaggttctcatatacgacgctagctctctgcagagcggggtcccgtctagattttctggatcgggctacggcactgacttcacactgaccatttcaagtctgcagcctgaggatagcgccacttattactgtcagcaagccaagtccttccccattaccttcgggcagggcactcggctcgagatcaaaggcggcggtgggtcaggcgggtccgggtcagggggaggaggttcagcatccggctctggtcaggtgcagctggtggagtccggcggcggtgtagtgcaaccagggcgaagcctgagattgtcgtgtgccgcttctggatttacattctccagttacgcttttcattgggtgagacaagccccaggcaaaggccttgagtgggtcgcggtgatttcatacgatgggagcaatcaatattatgcggatagcgtgaagggtaggttcaccatctctagggataatagtaaaaataccttgtatctgcagatgaactcccttcgggcagacgataccgcggtttattactgtgccagggacctggccattgcagtagctgggacctggcattactacaatggcatggacgtatggggccagggaactacagtaacagtctcctcaggaggaagctctggtcagatgcaactggtgcagagcggaccagaggtgaaaaaaccaggcaccagtgtcaaggtcagctgcaaggctagcgggttcacgtttacctcgtcagccgttcagtgggtgcgtcaggctcggggtcaaaggctggaatggataggctggattgtggtcggaagtggaaatacaaattatgcccaaaaattccaagaacgcgtcaccatcacgagagacatgtccaccagtacagcttacatggaactgtccagcctacgaagtgaagacacagctgtgtattattgcgcagcgcccaattgctccaacgttgtctgttacgacgggtttgatatctggggtcagggaacgatggtgactgtgtctagcgcctcaggaggctcaggcgacaaaacacatacttgccctccttgtcccgctccagagctcctgggcggcccatcagtttttttgtttccacccaaaccgaaggacactctgatgatcagccgaacgccagaagtcacatgtgtcgtggtggacgttagccacgaagatcctgaggtaaaatttaactggtacgtggacggtgtcgaggtgcacaacgcaaaaacaaaacctagggaagaacagtacaacagcacgtacagagtcgtgtcagttttgaccgtgctacaccaggattggcttaatgggaaggagtataaatgcaaggtgtccaacaaggctctacctgcacccattgagaagactatctccaaggccaagggccaaccacgggaacctcaggtctacaccctccctcccagtcgcgatgaactcactaagaaccaggtttctttgacatgccttgtgaaaggcttctatccatccgatatcgcagtcgagtgggagagcaacggccagcctgagaacaattataagacaaccccccccgtgctggattccgacgggtccttcttcctgtacagcaagctaacggtggacaagtctcgatggcagcaggggaacgtgttctcctgttcggtgcttcacgaagccctccactcccactatacacagaagtccttatcactctcccccggatagtga

SEQ ID NO: 697 - RNA, 2244 nt, synthetic construct
  misc_feature 1..2244: note = MX413 A19-61   A23-58H/B1-182L mRNA   with signal peptide
  source 1..2244: mol_type = other RNA
atgggctggtcgtgtatcattctattcctggtcgctactgctaccggtgtccactcagacattcagatgactcagtcaccttccagcgtgtcagcatcagtcggagatcgggtgattatcacttgccgggcaagtcagggaataagctcctggctggcctggtatcagcagaaacccggaaaggcccccaaagttctcatttacgacgccagcagccttcagtccggcgttccttctcgcttttctggttccggctacggtactgacttcacccttacgattagcagtttgcagccagaggattccgccacctattattgtcagcaggcgaaaagctttccaatcaccttcggccaaggcacccgcctcgaaattaagggggggtcatctggggagatagtgttaacccagtcccctgggaccctgagtctgagcccaggagaacgggctacactatcctgccgcgccagccaatctgtaagctcaagttatctcgcctggtaccagcagaagcccggccaggctcccagactactcatctacggagcctcttctcgagctacgggatttccggacagattctccggctctggctccggcaccgacttcactctgactataagcagattggagcctgaggacttcgcagtctattattgccagcagtatggcaacagcccctggacctttggacaaggaaccaaggttgaaatcagaggtggaggaggcagcggaggtagcgggagtggggggggcggttcagcatcaggctccggccagatgcagcttgtgcaatctgggccagaggtaaaaaagcccggaacctcagtgaaagtatcctgcaaggctagtgggttcacctttacttctagcgccgttcagtgggtgaggcaggcaagggggcaacgcctggagtggatcggctggatcgtcgtgggtagtgggaataccaattacgctcagaagttccaagaacgagtgactatcacgcgggatatgagtacttcaactgcctatatggaactgtcgagtctgcggtccgaggatactgcagtgtattactgcgctgccccgaactgctccaatgtggtgtgttatgacggctttgacatatggggccaagggacaatggtcaccgtatcatcgggcgggagcagtgggcaggtacaattggtcgaatcagggggaggcgtcgtccagcccggaagatcccttcgattgtcttgtgcggcaagtgggttcaccttttcgagctacgcgttccattgggtccgccaggccccagggaaaggtctggaatgggtcgcagtaatttcttacgacggtagtaaccagtattatgcggatagcgtgaaggggaggttcacaatctctcgggacaactctaaaaacaccctgtacttacagatgaactcgctgagagctgatgatacagccgtatactattgcgcacgagacctggccatcgctgtcgctggaacctggcattactacaacggcatggatgtttggggccaaggcacaaccgtgacggtcagcagcgcctccggtggaagcggcgacaagacgcacacatgtccaccctgtccagcacccgagctgctgggtggtccgtccgtttttttgttcccccccaagcctaaggacacactcatgatcagcaggaccccagaggtgacatgtgtggtggtggatgttagtcacgaggaccctgaagtgaaatttaactggtacgtggatggcgtggaggtgcacaacgcgaaaacaaaaccaagggaagagcaatacaatagcacataccgcgttgtcagcgttcttaccgtgctgcaccaggattggctgaatgggaaagaatacaaatgcaaggtgtccaataaagccctccccgcccctattgagaagactatttcaaaggccaaaggccagcctagggaaccgcaagtgtatacactcccaccaagccgtgatgagctcacaaagaaccaggtgtctcttacatgcctcgttaaggggttttacccctctgacatcgccgtcgagtgggagtccaatggacagcctgaaaataactacaagactacacctccggtgttggattccgatggctcattcttcctctactccaagctgacagtggacaaaagtcgttggcagcagggaaatgttttttcttgtagtgtgctgcatgaggctctacatagccactatacgcaaaagtccctgtccttatcacctggatagtga

SEQ ID NO: 698 - RNA, 2187 nt, synthetic construct
  misc_feature 1..2187: note = MX413 A19-61   A23-58H/B1-182L mRNA   without signal peptide
  source 1..2187: mol_type = other RNA
gacattcagatgactcagtcaccttccagcgtgtcagcatcagtcggagatcgggtgattatcacttgccgggcaagtcagggaataagctcctggctggcctggtatcagcagaaacccggaaaggcccccaaagttctcatttacgacgccagcagccttcagtccggcgttccttctcgcttttctggttccggctacggtactgacttcacccttacgattagcagtttgcagccagaggattccgccacctattattgtcagcaggcgaaaagctttccaatcaccttcggccaaggcacccgcctcgaaattaagggggggtcatctggggagatagtgttaacccagtcccctgggaccctgagtctgagcccaggagaacgggctacactatcctgccgcgccagccaatctgtaagctcaagttatctcgcctggtaccagcagaagcccggccaggctcccagactactcatctacggagcctcttctcgagctacgggatttccggacagattctccggctctggctccggcaccgacttcactctgactataagcagattggagcctgaggacttcgcagtctattattgccagcagtatggcaacagcccctggacctttggacaaggaaccaaggttgaaatcagaggtggaggaggcagcggaggtagcgggagtggggggggcggttcagcatcaggctccggccagatgcagcttgtgcaatctgggccagaggtaaaaaagcccggaacctcagtgaaagtatcctgcaaggctagtgggttcacctttacttctagcgccgttcagtgggtgaggcaggcaagggggcaacgcctggagtggatcggctggatcgtcgtgggtagtgggaataccaattacgctcagaagttccaagaacgagtgactatcacgcgggatatgagtacttcaactgcctatatggaactgtcgagtctgcggtccgaggatactgcagtgtattactgcgctgccccgaactgctccaatgtggtgtgttatgacggctttgacatatggggccaagggacaatggtcaccgtatcatcgggcgggagcagtgggcaggtacaattggtcgaatcagggggaggcgtcgtccagcccggaagatcccttcgattgtcttgtgcggcaagtgggttcaccttttcgagctacgcgttccattgggtccgccaggccccagggaaaggtctggaatgggtcgcagtaatttcttacgacggtagtaaccagtattatgcggatagcgtgaaggggaggttcacaatctctcgggacaactctaaaaacaccctgtacttacagatgaactcgctgagagctgatgatacagccgtatactattgcgcacgagacctggccatcgctgtcgctggaacctggcattactacaacggcatggatgtttggggccaaggcacaaccgtgacggtcagcagcgcctccggtggaagcggcgacaagacgcacacatgtccaccctgtccagcacccgagctgctgggtggtccgtccgtttttttgttcccccccaagcctaaggacacactcatgatcagcaggaccccagaggtgacatgtgtggtggtggatgttagtcacgaggaccctgaagtgaaatttaactggtacgtggatggcgtggaggtgcacaacgcgaaaacaaaaccaagggaagagcaatacaatagcacataccgcgttgtcagcgttcttaccgtgctgcaccaggattggctgaatgggaaagaatacaaatgcaaggtgtccaataaagccctccccgcccctattgagaagactatttcaaaggccaaaggccagcctagggaaccgcaagtgtatacactcccaccaagccgtgatgagctcacaaagaaccaggtgtctcttacatgcctcgttaaggggttttacccctctgacatcgccgtcgagtgggagtccaatggacagcctgaaaataactacaagactacacctccggtgttggattccgatggctcattcttcctctactccaagctgacagtggacaaaagtcgttggcagcagggaaatgttttttcttgtagtgtgctgcatgaggctctacatagccactatacgcaaaagtccctgtccttatcacctggatagtga

SEQ ID NO: 699 - RNA, 2250 nt, synthetic construct
  misc_feature 1..2250: note = MX490 A23-58H/B1-182L   A19-46 mRNA   with signal peptide
  source 1..2250: mol_type = other RNA
atgggatggtcttgcatcattctgtttttagttgcgaccgccaccggggtccacagcgaaattgtgctgactcaaagtcctggtaccctgtccctttcgcctggtgaacgagccacattatcttgtcgcgccagccagagtgtctctagctcatatcttgcttggtaccaacagaagcccggccaggccccccgcctgctgatatatggggcgtcaagtcgagcaactggcttccccgataggttcagcgggagcggatccggtaccgatttcactctgactatcagcaggctggaacccgaggattttgcagtctactattgccagcagtacggaaactcaccttggacatttgggcaggggacgaaagttgaaattaggggggggagcagtggccagacagtagttactcaggagccctcatttagcgtttcccccggtggtaccgtgacccttacctgcggcctatctagcggatccgtgtcaacagcgtacttcccatcttggtaccagcagaccccaggccaagccccccggactcttatctacgggacaaacacccgaagctccggagtgccggatagattttcggggagcattctgggaaacaaagctgcactgacaatcaccggggcccaggccgatgatgagagcgactattattgtgtgctgtacatgggacgcgggatcgtggtgtttggcggcggaactaagctcacagtactcggcggggggggatcgggaggttctggcagcgggggggggggctccgcatctgggagcggccaagtgcagctcgtggagagcggtggaggcgtcgtccaaccaggcaggagtctccgcttgtcttgcgctgcctccggcttcacactgtcatcatatggcatgcactgggtgcgccaagcacctggcaagggcctggaatgggtggccgtcatatcctatgatggttccaacaagtattatgttgactctgtgaagggaagatttacaatctcacgggacaattcaaagaatactctgtacttgcagatgaattctctgcgggccgaggacaccgctgtgtattattgcgctcgaggctgggcttattgggagctcctgcctgattactattatggcatggatgtatgggggcagggtacaacggtaacagtgtcgagtggtggatcttccgggcagatgcagctggtgcagtctggccccgaagttaaaaagccgggtacgagcgtgaaggtgagctgcaaagcaagcggattcacattcacaagcagtgcggttcagtgggtgcgtcaggcgcggggccagagactcgaatggatcggctggatagtggtaggttccggcaacactaactacgcccagaaattccaggagagggtaacaataactagggacatgtccacctccacagcatacatggagctttcatccctgagaagtgaggacactgcagtgtactactgtgccgctccaaattgttccaatgtcgtgtgttacgacgggttcgacatttggggtcaaggcaccatggttacggtgagttccgcctcaggaggctcaggcgacaaaacccatacgtgtccaccctgtccagctcctgagctcctgggaggcccctcagtgtttctcttcccacccaaacctaaagacactttaatgattagccggacaccagaggtcacatgcgtagtggtcgacgtgtctcatgaggatccagaagtcaagtttaattggtacgtcgacggagtagaggttcacaacgctaagaccaagccacgtgaagaacagtacaactctacgtacagagtggtcagtgtgctaacggtgctgcatcaggactggttgaacggaaaggagtacaaatgtaaggtttccaataaggcactcccggcccccatcgagaagaccatctctaaggccaaaggacagccccgggagcctcaagtctatactttaccacctagccgcgatgagttgactaagaaccaggtcagcctgacctgcctggttaaaggattctacccatcagacattgccgtcgaatgggagagtaatggccagccggaaaataattataagaccaccccgcctgtcctcgactccgatggaagtttctttctctactctaaattgaccgtggataaaagtagatggcaacaggggaacgttttctcctgctctgtgctacacgaagctttgcatagccactacacccaaaaatcccttagtctatcgcctggctagtga

SEQ ID NO: 700 - RNA, 2193 nt, synthetic construct
  misc_feature 1..2193: note = MX490 A23-58H/B1-182L   A19-46 mRNA   without signal peptide
  source 1..2193: mol_type = other RNA
gaaattgtgctgactcaaagtcctggtaccctgtccctttcgcctggtgaacgagccacattatcttgtcgcgccagccagagtgtctctagctcatatcttgcttggtaccaacagaagcccggccaggccccccgcctgctgatatatggggcgtcaagtcgagcaactggcttccccgataggttcagcgggagcggatccggtaccgatttcactctgactatcagcaggctggaacccgaggattttgcagtctactattgccagcagtacggaaactcaccttggacatttgggcaggggacgaaagttgaaattaggggggggagcagtggccagacagtagttactcaggagccctcatttagcgtttcccccggtggtaccgtgacccttacctgcggcctatctagcggatccgtgtcaacagcgtacttcccatcttggtaccagcagaccccaggccaagccccccggactcttatctacgggacaaacacccgaagctccggagtgccggatagattttcggggagcattctgggaaacaaagctgcactgacaatcaccggggcccaggccgatgatgagagcgactattattgtgtgctgtacatgggacgcgggatcgtggtgtttggcggcggaactaagctcacagtactcggcggggggggatcgggaggttctggcagcgggggggggggctccgcatctgggagcggccaagtgcagctcgtggagagcggtggaggcgtcgtccaaccaggcaggagtctccgcttgtcttgcgctgcctccggcttcacactgtcatcatatggcatgcactgggtgcgccaagcacctggcaagggcctggaatgggtggccgtcatatcctatgatggttccaacaagtattatgttgactctgtgaagggaagatttacaatctcacgggacaattcaaagaatactctgtacttgcagatgaattctctgcgggccgaggacaccgctgtgtattattgcgctcgaggctgggcttattgggagctcctgcctgattactattatggcatggatgtatgggggcagggtacaacggtaacagtgtcgagtggtggatcttccgggcagatgcagctggtgcagtctggccccgaagttaaaaagccgggtacgagcgtgaaggtgagctgcaaagcaagcggattcacattcacaagcagtgcggttcagtgggtgcgtcaggcgcggggccagagactcgaatggatcggctggatagtggtaggttccggcaacactaactacgcccagaaattccaggagagggtaacaataactagggacatgtccacctccacagcatacatggagctttcatccctgagaagtgaggacactgcagtgtactactgtgccgctccaaattgttccaatgtcgtgtgttacgacgggttcgacatttggggtcaaggcaccatggttacggtgagttccgcctcaggaggctcaggcgacaaaacccatacgtgtccaccctgtccagctcctgagctcctgggaggcccctcagtgtttctcttcccacccaaacctaaagacactttaatgattagccggacaccagaggtcacatgcgtagtggtcgacgtgtctcatgaggatccagaagtcaagtttaattggtacgtcgacggagtagaggttcacaacgctaagaccaagccacgtgaagaacagtacaactctacgtacagagtggtcagtgtgctaacggtgctgcatcaggactggttgaacggaaaggagtacaaatgtaaggtttccaataaggcactcccggcccccatcgagaagaccatctctaaggccaaaggacagccccgggagcctcaagtctatactttaccacctagccgcgatgagttgactaagaaccaggtcagcctgacctgcctggttaaaggattctacccatcagacattgccgtcgaatgggagagtaatggccagccggaaaataattataagaccaccccgcctgtcctcgactccgatggaagtttctttctctactctaaattgaccgtggataaaagtagatggcaacaggggaacgttttctcctgctctgtgctacacgaagctttgcatagccactacacccaaaaatcccttagtctatcgcctggctagtga

SEQ ID NO: 701 - RNA, 2250 nt, synthetic construct
  misc_feature 1..2250: note = MX492 A19-46   A23-58H/B1-182L mRNA   with signal peptide
  source 1..2250: mol_type = other RNA
atgggctggtcctgtataattctttttctggtggcaacagccactggcgtccattcacagaccgtcgtcacacaggagccatctttttcagtgtccccaggcggaacagtcaccctgacttgcggattgtctagtgggtctgtgtcgacggcttactttcccagttggtatcaacaaacccctgggcaggctccacggactctgatctacggcacaaataccagaagcagcggggtgcccgatcggttcagcggatcaatcttggggaacaaggccgcactgacaattaccggggcacaggccgacgacgaatccgattattactgcgtgctatatatgggccgcggtattgtggtgtttggagggggtaccaagctgacggtcttgggcggaagtagtggcgagatagttctgactcagtcaccaggtactctaagtctatccccgggtgaacgcgccactctctcttgtcgggccagtcagtctgtatcttcttcgtacctggcatggtatcaacagaagcctgggcaggccccacgcttgctcatttatggcgcgtcgagccgtgcgactgggttccctgacagattctctggatcaggatccggaaccgatttcacacttactatctcccgactggagcccgaagattttgcagtgtactattgccagcaatacggcaattctccatggaccttcggccagggcacgaaagtggagatccgaggagggggtggcagtggtggtagtggaagcggcgggggcggcagtgccagcggatctgggcaaatgcagctggttcagtccggtcccgaggtcaaaaagcctgggacttcagttaaagtgtcatgcaaggcctcaggctttacatttacatctagcgctgttcagtgggtgaggcaggcgaggggacagcgcctggaatggattggttggatcgtggtagggagcggaaataccaactacgcccagaaattccaggagcgagttaccatcacccgcgatatgtcaacgtctacggcatatatggaattatcctccctcagatccgaggacacagcagtctactattgcgcggcacccaattgctccaacgtggtctgctacgatggatttgatatatgggggcagggcacgatggtgaccgtgagtagcggcggcagcagcggtcaggtgcaacttgtggagagcggcgggggggtcgtccagcccggaaggagcctgaggcttagctgtgccgccagcgggttcaccttgtcctcttatgggatgcactgggttcgtcaagcccccggaaaaggactcgagtgggtcgcagttatatcatatgacggcagtaacaagtactacgtagacagtgtaaaaggccggttcaccatcagtagagataacagtaaaaatacactctatcttcagatgaactcgctccgcgccgaagataccgctgtgtattactgtgctaggggctgggcttactgggagttactgcctgactactattatggtatggacgtctggggtcaaggaacaaccgttacagtgtcttcagcgtccggcggcagcggggacaaaactcatacttgtccaccctgtcccgcccctgagctcttgggcgggccatcagttttcctgttccccccaaaaccaaaagacactctgatgatttctaggaccccagaggttacttgcgtggtagtggatgtctcccatgaagatcctgaggtgaagtttaactggtacgtcgatggagtcgaggtgcacaacgccaagacaaagcctcgagaagagcaatacaacagcacataccgggtagtttcagtattaactgtgctgcaccaggactggctgaatgggaaagaatataagtgtaaggtttccaataaggccctcccggctccaatcgaaaagacaatttccaaagctaagggacagcccagagaacctcaggtgtacacactgccgcctagccgggacgagctcacgaagaatcaggtgtcactcacctgcctggtgaaaggcttttatccttccgacatcgctgtagagtgggaatcgaacggacagcccgaaaataattacaagaccacacccccggtgctcgattccgacggttctttcttcttatacagcaagctaaccgtcgacaaatccagatggcagcaaggcaacgtgttcagctgtagcgtgcttcacgaggctctgcatagccactacacccagaagagcctgtctctgtccccgggctagtga

SEQ ID NO: 702 - RNA, 2193 nt, synthetic construct
  misc_feature 1..2193: note = MX492 A19-46   A23-58H/B1-182L mRNA   without signal peptide
  source 1..2193: mol_type = other RNA
cagaccgtcgtcacacaggagccatctttttcagtgtccccaggcggaacagtcaccctgacttgcggattgtctagtgggtctgtgtcgacggcttactttcccagttggtatcaacaaacccctgggcaggctccacggactctgatctacggcacaaataccagaagcagcggggtgcccgatcggttcagcggatcaatcttggggaacaaggccgcactgacaattaccggggcacaggccgacgacgaatccgattattactgcgtgctatatatgggccgcggtattgtggtgtttggagggggtaccaagctgacggtcttgggcggaagtagtggcgagatagttctgactcagtcaccaggtactctaagtctatccccgggtgaacgcgccactctctcttgtcgggccagtcagtctgtatcttcttcgtacctggcatggtatcaacagaagcctgggcaggccccacgcttgctcatttatggcgcgtcgagccgtgcgactgggttccctgacagattctctggatcaggatccggaaccgatttcacacttactatctcccgactggagcccgaagattttgcagtgtactattgccagcaatacggcaattctccatggaccttcggccagggcacgaaagtggagatccgaggagggggtggcagtggtggtagtggaagcggcgggggcggcagtgccagcggatctgggcaaatgcagctggttcagtccggtcccgaggtcaaaaagcctgggacttcagttaaagtgtcatgcaaggcctcaggctttacatttacatctagcgctgttcagtgggtgaggcaggcgaggggacagcgcctggaatggattggttggatcgtggtagggagcggaaataccaactacgcccagaaattccaggagcgagttaccatcacccgcgatatgtcaacgtctacggcatatatggaattatcctccctcagatccgaggacacagcagtctactattgcgcggcacccaattgctccaacgtggtctgctacgatggatttgatatatgggggcagggcacgatggtgaccgtgagtagcggcggcagcagcggtcaggtgcaacttgtggagagcggcgggggggtcgtccagcccggaaggagcctgaggcttagctgtgccgccagcgggttcaccttgtcctcttatgggatgcactgggttcgtcaagcccccggaaaaggactcgagtgggtcgcagttatatcatatgacggcagtaacaagtactacgtagacagtgtaaaaggccggttcaccatcagtagagataacagtaaaaatacactctatcttcagatgaactcgctccgcgccgaagataccgctgtgtattactgtgctaggggctgggcttactgggagttactgcctgactactattatggtatggacgtctggggtcaaggaacaaccgttacagtgtcttcagcgtccggcggcagcggggacaaaactcatacttgtccaccctgtcccgcccctgagctcttgggcgggccatcagttttcctgttccccccaaaaccaaaagacactctgatgatttctaggaccccagaggttacttgcgtggtagtggatgtctcccatgaagatcctgaggtgaagtttaactggtacgtcgatggagtcgaggtgcacaacgccaagacaaagcctcgagaagagcaatacaacagcacataccgggtagtttcagtattaactgtgctgcaccaggactggctgaatgggaaagaatataagtgtaaggtttccaataaggccctcccggctccaatcgaaaagacaatttccaaagctaagggacagcccagagaacctcaggtgtacacactgccgcctagccgggacgagctcacgaagaatcaggtgtcactcacctgcctggtgaaaggcttttatccttccgacatcgctgtagagtgggaatcgaacggacagcccgaaaataattacaagaccacacccccggtgctcgattccgacggttctttcttcttatacagcaagctaaccgtcgacaaatccagatggcagcaaggcaacgtgttcagctgtagcgtgcttcacgaggctctgcatagccactacacccagaagagcctgtctctgtccccgggctagtga

SEQ ID NO: 703 - DNA, 1491 bp, synthetic construct
  misc_feature 1..1491: note = MX1019 B8_scFv_Fc   DNA   with signal peptide
  source 1..1491: mol_type = other DNA
atgggctggtcctgcatcatcctgtttctggtggccacagccaccggtgtgcactctgagatcgtgatgacacagagccccgccatcctgagtgtgtctccaggcgaaagagccacactgagctgtagagcctctcagagcgtggccatcaacctggcctggtatcagcagaagcctggacaggctccccggctgctgatctatgccgcttcttctagagccacaggcatccctggcagattttctggcagcggcagcgagacaaacttcaccctgaccatcagctccctgcagagcggcgatttcgccgtgtactactgccagcagtacatcacctggccacctagctacacctttggccagggcaccaagctggaaatcaaaggaggtggtggctctggcggatctgggagtggtggcggaggctctgcttctggatctggagaagtgcagctggtggaaagtggcggagcactgattcagcctggcggctctctgagactgtcttgtgccgcctctggcatcatcgtgtccgccaactacatgagctgggtccgacaggcccctggcaaaggacttgaatgggtgtccgtgatctacagcggcggcagcaccttttacgccgactctgtgaagggcagattcaccatcagccgggacaacagcaagaacaccctgtacctggaaatgaacagcctgagagccgaggacaccgctgtgtactattgcgccagagatgcccctatcctgggcgtgtcagattggggccagggaacactggtcacagtgtctagcgcttctggcggctccggagataagacccacacatgtcctccatgtcctgctccagaactgctcggcggcccttctgtgttcctgtttcctccaaagcctaaggacaccctgatgatcagcagaacccctgaagtgacctgcgtggtggtggatgtgtctcacgaggaccccgaagtgaagttcaattggtacgtggacggcgtggaagtgcacaacgccaagaccaagcctagagaggaacagtacaacagcacctacagagtggtgtccgtgctgaccgtgctgcaccaggattggctgaacggcaaagagtacaagtgcaaggtgtccaacaaggccctgcctgctcctatcgagaaaaccatcagcaaggccaagggccagcctagggaaccccaggtttacacccttcctccaagccgggatgagctgaccaagaaccaggtgtccctgacatgtctcgtgaagggcttctaccccagcgacattgccgtggaatgggagagcaatggccagcctgagaacaactacaagacaacccctcctgtgctggacagcgacggctcattcttcctgtacagcaagctgacagtcgacaagtccagatggcagcagggcaacgtgttcagttgcagcgtgctgcacgaggccctgcacagtcactacacccagaagtccctgagcctgtctcctgga

SEQ ID NO: 704 - DNA, 1434 bp, synthetic construct; identical to SEQ ID NO: 330
  misc_feature 1..1434: note = MX1019 B8_scFv_Fc   DNA   without signal peptide
  source 1..1434: mol_type = other DNA

SEQ ID NO: 705 - DNA, 1491 bp, synthetic construct
  misc_feature 1..1491: note = MX1025 E12_scFv_Fc   DNA   with signal peptide
  source 1..1491: mol_type = other DNA
atgggctggtcctgcatcatcctgtttctggtggccacagccaccggtgtgcactctgagatcgtgctgacacagagccctggcacactgtcactgtctccaggcgaaacagccacactgagctgtagagccagccagagcttcagcagcgacctggcttggtatcagcagaagcctggacaggcccctcggctgttgatctatggcgcctcttctagagccacaggcatccccgatagattcagcggctctggcagcggcaccgatttcaccctgacaatcagcagactggaacccgccgacttcgccgtgtactactgtcagcagtacggcagcagccctcctgtgacatttggcggcggaacaaaggtggaaatcaaaggaggtggtggctctggcggatctgggagtggtggcggaggctctgcttctggatctggagaagtgcagctggtggaatcaggcggcggactgattcaacctggcggctctctgagactgtcttgtgctgcttctggcgtgatcgtgtcctacaactacatgaactgggtccgacaggctcccggcaaaggccttgaatgggtgtccgtgatctacagcggcggcagcaccttttacgccgattctgtgcggggcagattcaccatcagccgggacaacagcaagaacaccctgtacctgcagatgaacagcctgagagccgaggacaccgctgtgtactattgcgccagagatctgggacctgccggcgcttttgatatctggggcctgggcacaatggtcaccgtgtctagcgcttctggcggctccggagataagacccacacatgtcctccatgtcctgctccagaactgctcggcggcccttctgtgttcctgtttcctccaaagcctaaggacaccctgatgatcagcagaacccctgaagtgacctgcgtggtggtggatgtgtctcacgaggaccccgaagtgaagttcaattggtacgtggacggcgtggaagtgcacaacgccaagaccaagcctagagaggaacagtacaacagcacctacagagtggtgtccgtgctgaccgtgctgcaccaggattggctgaacggcaaagagtacaagtgcaaggtgtccaacaaggccctgcctgctcctatcgagaaaaccatcagcaaggccaagggccagcctagggaaccccaggtttacacccttcctccaagccgggatgagctgaccaagaaccaggtgtccctgacatgtctcgtgaagggcttctaccccagcgacattgccgtggaatgggagagcaatggccagcctgagaacaactacaagacaacccctcctgtgctggacagcgacggctcattcttcctgtacagcaagctgacagtcgacaagtccagatggcagcagggcaacgtgttcagttgcagcgtgctgcacgaggccctgcacagtcactacacccagaagtccctgagcctgtctcctgga

SEQ ID NO: 706 - DNA, 1434 bp, synthetic construct; identical to SEQ ID NO: 332
  misc_feature 1..1434: note = MX1025 E12_scFv_Fc   DNA   without signal peptide
  source 1..1434: mol_type = other DNA

SEQ ID NO: 707 - DNA, 1527 bp, synthetic construct
  misc_feature 1..1527: note = MX1026 E8_scFv_Fc   DNA   with signal peptide
  source 1..1527: mol_type = other DNA
atgggctggtcctgcatcatcctgtttctggtggccacagccaccggtgtgcactctgacaccgtgatgacacagagccctctgagcctgcctgtgacacctggcgaacctgccagcatcagctgtagaagcagccagagcctgctgaacagcaacggctacaactacctggattggtacgtgcagaagcccggccagtctcctcagctgctgatctacctgggcagcaatagagccagcggcgtgcccgatagattttctggctctggcagcggcaccgacttcaccctgaagatctctagagtggaagccgaggacgtgggcgtgtactactgtatgcagcctctgcagacccctctgttcacatttggccctggcaccaaggtggaaatcaaaggaggtggtggctctggcggatctgggagtggtggcggaggctctgcttctggatctggacaagtgacactgagagagtctggccccgctctggtcaagcctacacagaccctgacactgacctgcaccttcagcggcttcagcctgtctactagaggcgtgtgcgtgtcctggatcagacagcctcctggaaaggccctggaatggctggccttcatcgactgggacgacgacaagtactacaacaccagcctgaaaacccggctgaccatcagcaaggacaccagcaagaaccaggtggtgctgaccatgaccaacgtgcaccctgtggataccgccacctactactgcgccagaatcagctctcaccacggctccagctggtgtaccaccttcgattattggggccagggcgctctcgtgacagtttctgctgcttctggcggctccggagataagacccacacatgtcctccatgtcctgctccagaactgctcggcggcccttctgtgttcctgtttcctccaaagcctaaggacaccctgatgatcagcagaacccctgaagtgacctgcgtggtggtggatgtgtctcacgaggaccccgaagtgaagttcaattggtacgtggacggcgtggaagtgcacaacgccaagaccaagcctagagaggaacagtacaacagcacctacagagtggtgtccgtgctgaccgtgctgcaccaggattggctgaacggcaaagagtacaagtgcaaggtgtccaacaaggccctgcctgctcctatcgagaaaaccatcagcaaggccaagggccagcctagggaaccccaggtttacacccttcctccaagccgggatgagctgaccaagaaccaggtgtccctgacatgtctcgtgaagggcttctaccccagcgacattgccgtggaatgggagagcaatggccagcctgagaacaactacaagacaacccctcctgtgctggacagcgacggctcattcttcctgtacagcaagctgacagtcgacaagtccagatggcagcagggcaacgtgttcagttgcagcgtgctgcacgaggccctgcacagtcactacacccagaagtccctgagcctgtctcctgga

SEQ ID NO: 708 - DNA, 1470 bp, synthetic construct; identical to SEQ ID NO: 334
  misc_feature 1..1470: note = MX1026 E8_scFv_Fc   DNA   wtihout signal peptide
  source 1..1470: mol_type = other DNA

SEQ ID NO: 709 - DNA, 2199 bp, synthetic construct
  misc_feature 1..2199: note = MX1018 B8 x B8   DNA   with signal peptide
  source 1..2199: mol_type = other DNA
atgggctggtcctgcatcatcctgtttctggtggccacagccaccggtgtgcactctgagatcgtgatgacacagagccccgccatcctgagtgtgtctccaggcgaaagagccacactgagctgtagagcctctcagagcgtggccatcaacctggcctggtatcagcagaagcctggacaggctccccggctgctgatctatgccgcttcttctagagccacaggcatccctggcagattttctggcagcggcagcgagacaaacttcaccctgaccatcagctccctgcagagcggcgatttcgccgtgtactactgccagcagtacatcacctggccacctagctacacctttggccagggcaccaagctggaaatcaaaggcggatcctctggagaaattgtgatgacccagtctcctgccatcctgtccgtttctccaggggagagagctaccctgtcttgcagagcttctcagtctgtggctatcaatctcgcttggtatcaacaaaagcccgggcaagcccctagactgctgatatacgctgccagctccagagccaccggaattcccggaagattcagcggctctggctccgagactaatttcacactgacaatctccagcctgcagtccggggactttgccgtgtattattgtcaacagtatattacgtggccgccgtcctacacattcggacagggaacaaagctcgagatcaaaggaggtggtggctctggcggatctgggagtggtggcggaggctctgcttctggatctggagaagtgcagctggtggaaagtggcggagcactgattcagcctggcggctctctgagactgtcttgtgccgcctctggcatcatcgtgtccgccaactacatgagctgggtccgacaggcccctggcaaaggacttgaatgggtgtccgtgatctacagcggcggcagcaccttttacgccgactctgtgaagggcagattcaccatcagccgggacaacagcaagaacaccctgtacctggaaatgaacagcctgagagccgaggacaccgctgtgtactattgcgccagagatgcccctatcctgggcgtgtcagattggggccagggaacactggtcacagtgtctagcggaggcagctccggggaggtccagctcgttgaatctggtggcgccctgattcaaccaggtggaagcctgagactgagctgcgccgcttccggaatcattgtgtctgccaattatatgtcttgggttcgacaagctcccggcaagggcctcgagtgggtttcagtgatctattccggcggctccacattctacgccgacagcgtgaaaggccggtttaccatcagcagagacaattccaagaatacgctctacctcgagatgaactcactgcgcgccgaggatacagcagtgtattactgtgctcgggacgctcccattctgggagtgtctgactggggacaaggcaccctcgtgacagtgtcatctgcttctggcggctccggagataagacccacacatgtcctccatgtcctgctccagaactgctcggcggcccttctgtgttcctgtttcctccaaagcctaaggacaccctgatgatcagcagaacccctgaagtgacctgcgtggtggtggatgtgtctcacgaggaccccgaagtgaagttcaattggtacgtggacggcgtggaagtgcacaacgccaagaccaagcctagagaggaacagtacaacagcacctacagagtggtgtccgtgctgaccgtgctgcaccaggattggctgaacggcaaagagtacaagtgcaaggtgtccaacaaggccctgcctgctcctatcgagaaaaccatcagcaaggccaagggccagcctagggaaccccaggtttacacccttcctccaagccgggatgagctgaccaagaaccaggtgtccctgacatgtctcgtgaagggcttctaccccagcgacattgccgtggaatgggagagcaatggccagcctgagaacaactacaagacaacccctcctgtgctggacagcgacggctcattcttcctgtacagcaagctgacagtcgacaagtccagatggcagcagggcaacgtgttcagttgcagcgtgctgcacgaggccctgcacagtcactacacccagaagtccctgagcctgtctcctgga

SEQ ID NO: 710 - DNA, 2142 bp, synthetic construct; identical to SEQ ID NO: 292
  misc_feature 1..2142: note = MX1018 B8 x B8   DNA   without signal peptide
  source 1..2142: mol_type = other DNA

SEQ ID NO: 711 - protein, 580 aa, synthetic construct
  REGION 1..580: note = A19-46_A23-58__CODVH_holeLS - peptide without signal
QMQLVQSGPEVKKPGTSVKVSCKASGFTFTSSAVQWVRQRQRLEWIGWIVVGSGNTNYAQKFQERVTITRDMSTSTAYMELSSLRSEDTAVYYCAAPNCSNVVCYDGFDIWGQGTMVTVSSDKTHTQVQLVESGGGVVQPGRSLRLSCAASGFTLSSYGMHWVRQAPGKGLEWVAVISYDGSNKYYVDSVKGRFTISRDNSKNTLYLQMNSLRAEDTAVYYCRWAYWELLPDYYYGMDVWGQGTTVTVSSDKTHTASTKGPSVFPLAPSSKSTSGGTAALGCLVKDYFPEPVTVSWNSGALTSGVHTFPAVLQSSGSLSSVVTVPSSSLGTQTYICNVNHKPSNTKVDKKVEPKSCDKTHTCPPCPAPELLGGPSVFLFPPKPKDTLMISRTPEVTCVVVDVSHEDPEVKFNWYVDGVEVHNAKTKPREEQYNSYVVSVLTVLHQDWLNGKEYKCKVSNKALPAPIEKTISKAKGQPREPQVCTLPPSRDELTKNQVSLSCAVKGFYPSDIAVEWESNGQPENNYKTTPPVLDSDGSFFLVSKLTVDKSRWQQGNVFSCSVLHEALHSHYTQKSLSLSPG

SEQ ID NO: 712 - protein, 599 aa, synthetic construct
  REGION 1..599: note = A19-46_A23-58__CODVH_holeLS - peptide with signal
MGWSCIILFLVATATGVHSQMQLVQSGPEVKKPGTSVKVSCKASGFTFTSSAVQWVRQRQRLEWIGWIVVGSGNTNYAQKFQERVTITRDMSTSTAYMELSSLRSEDTAVYYCAAPNCSNVVCYDGFDIWGQGTMVTVSSDKTHTQVQLVESGGGVVQPGRSLRLSCAASGFTLSSYGMHWVRQAPGKGLEWVAVISYDGSNKYYVDSVKGRFTISRDNSKNTLYLQMNSLRAEDTAVYYCRWAYWELLPDYYYGMDVWGQGTTVTVSSDKTHTASTKGPSVFPLAPSSKSTSGGTAALGCLVKDYFPEPVTVSWNSGALTSGVHTFPAVLQSSGSLSSVVTVPSSSLGTQTYICNVNHKPSNTKVDKKVEPKSCDKTHTCPPCPAPELLGGPSVFLFPPKPKDTLMISRTPEVTCVVVDVSHEDPEVKFNWYVDGVEVHNAKTKPREEQYNSYVVSVLTVLHQDWLNGKEYKCKVSNKALPAPIEKTISKAKGQPREPQVCTLPPSRDELTKNQVSLSCAVKGFYPSDIAVEWESNGQPENNYKTTPPVLDSDGSFFLVSKLTVDKSRWQQGNVFSCSVLHEALHSHYTQKSLSLSPG

SEQ ID NO: 713 - protein, 580 aa, synthetic construct; identical to SEQ ID NO: 162
  REGION 1..580: note = A19-46_B1-182 CODVH holeLS - peptide without signal

SEQ ID NO: 714 - protein, 599 aa, synthetic construct; identical to SEQ ID NO: 163
  REGION 1..599: note = A19-46_B1-182 CODVH holeLS - peptide with signal

SEQ ID NO: 715 - protein, 335 aa, synthetic construct; identical to SEQ ID NO: 164
  REGION 1..335: note = A19-46_B1-182 CODVL - peptide without signal

SEQ ID NO: 716 - protein, 354 aa, synthetic construct; identical to SEQ ID NO: 165
  REGION 1..354: note = A19-46_B1-182 CODVL - peptide with signal

SEQ ID NO: 717 - protein, 447 aa, synthetic construct; identical to SEQ ID NO: 150
  REGION 1..447: note = A19-46 monoH knobLS - peptide without signal

SEQ ID NO: 718 - protein, 466 aa, synthetic construct; identical to SEQ ID NO: 151
  REGION 1..466: note = A19-46 monoH knobLS - peptide with signal

SEQ ID NO: 719 - protein, 217 aa, synthetic construct; identical to SEQ ID NO: 152
  REGION 1..217: note = A19-46 monoL - peptide without signal

SEQ ID NO: 720 - protein, 236 aa, synthetic construct; identical to SEQ ID NO: 153
  REGION 1..236: note = A19-46 monoL - peptide with signal

SEQ ID NO: 721 - protein, 583 aa, synthetic construct
  REGION 1..583: note = A19-61_A23-58 CODVH hole LS - peptide without signal
QMQLVQSGPEVKKPGTSVKVSCKASGFTFTSSAVQWVRQRQRLEWIGWIVVGSGNTNYAQKFQERVTITRDMSTSTAYMELSSLRSEDTAVYYCAAPNCSNVVCYDGFDIWGQGTMVTVSSDKTHTQVQLVESGGGVVQPGRSLRLSCAASGFTFSSYAFHWVRQAPGKGLEWVAVISYDGSNQYYADSVKGRFTISRDNSKNTLYLQMNSLRADDTAVYYCARDLAIAVAGTWHYYNGMDVWGQGTTVTVSSDKTHTASTKGPSVFPLAPSSKSTSGGTAALGCLVKDYFPEPVTVSWNSGALTSGVHTFPAVLQSSGSLSSVVTVPSSSLGTQTYICNVNHKPSNTKVDKKVEPKSCDKTHTCPPCPAPELLGGPSVFLFPPKPKDTLMISRTPEVTCVVVDVSHEDPEVKFNWYVDGVEVHNAKTKPREEQYNSYVVSVLTVLHQDWLNGKEYKCKVSNKALPAPIEKTISKAKGQPREPQVCTLPPSRDELTKNQVSLSCAVKGFYPSDIAVEWESNGQPENNYKTTPPVLDSDGSFFLVSKLTVDKSRWQQGNVFSCSVLHEALHSHYTQKSLSLSPG

SEQ ID NO: 722 - protein, 602 aa, synthetic construct
  REGION 1..602: note = A19-61_A23-58 CODVH hole LS - peptide with signal
MGWSCIILFLVATATGVHSQMQLVQSGPEVKKPGTSVKVSCKASGFTFTSSAVQWVRQRQRLEWIGWIVVGSGNTNYAQKFQERVTITRDMSTSTAYMELSSLRSEDTAVYYCAAPNCSNVVCYDGFDIWGQGTMVTVSSDKTHTQVQLVESGGGVVQPGRSLRLSCAASGFTFSSYAFHWVRQAPGKGLEWVAVISYDGSNQYYADSVKGRFTISRDNSKNTLYLQMNSLRADDTAVYYCARDLAIAVAGTWHYYNGMDVWGQGTTVTVSSDKTHTASTKGPSVFPLAPSSKSTSGGTAALGCLVKDYFPEPVTVSWNSGALTSGVHTFPAVLQSSGSLSSVVTVPSSSLGTQTYICNVNHKPSNTKVDKKVEPKSCDKTHTCPPCPAPELLGGPSVFLFPPKPKDTLMISRTPEVTCVVVDVSHEDPEVKFNWYVDGVEVHNAKTKPREEQYNSYVVSVLTVLHQDWLNGKEYKCKVSNKALPAPIEKTISKAKGQPREPQVCTLPPSRDELTKNQVSLSCAVKGFYPSDIAVEWESNGQPENNYKTTPPVLDSDGSFFLVSKLTVDKSRWQQGNVFSCSVLHEALHSHYTQKSLSLSPG

SEQ ID NO: 723 - protein, 583 aa, synthetic construct
  REGION 1..583: note = A19-61_B1-182 CODVH holeLS - peptide without signal
QMQLVQSGPEVKKPGTSVKVSCKASGFTFTSSAVQWVRQRQRLEWIGWIVVGSGNTNYAQKFQERVTITRDMSTSTAYMELSSLRSEDTAVYYCAAPYCSGGSCFDGFDIWGQGTMVTVSSDKTHTQVQLVESGGGVVQPGRSLRLSCAASGFTFSSYAFHWVRQAPGKGLEWVAVISYDGSNQYYADSVKGRFTISRDNSKNTLYLQMNSLRADDTAVYYCARDLAIAVAGTWHYYNGMDVWGQGTTVTVSSDKTHTASTKGPSVFPLAPSSKSTSGGTAALGCLVKDYFPEPVTVSWNSGALTSGVHTFPAVLQSSGSLSSVVTVPSSSLGTQTYICNVNHKPSNTKVDKKVEPKSCDKTHTCPPCPAPELLGGPSVFLFPPKPKDTLMISRTPEVTCVVVDVSHEDPEVKFNWYVDGVEVHNAKTKPREEQYNSYVVSVLTVLHQDWLNGKEYKCKVSNKALPAPIEKTISKAKGQPREPQVCTLPPSRDELTKNQVSLSCAVKGFYPSDIAVEWESNGQPENNYKTTPPVLDSDGSFFLVSKLTVDKSRWQQGNVFSCSVLHEALHSHYTQKSLSLSPG

SEQ ID NO: 724 - protein, 602 aa, synthetic construct
  REGION 1..602: note = A19-61_B1-182 CODVH holeLS - peptide with signal
MGWSCIILFLVATATGVHSQMQLVQSGPEVKKPGTSVKVSCKASGFTFTSSAVQWVRQRQRLEWIGWIVVGSGNTNYAQKFQERVTITRDMSTSTAYMELSSLRSEDTAVYYCAAPYCSGGSCFDGFDIWGQGTMVTVSSDKTHTQVQLVESGGGVVQPGRSLRLSCAASGFTFSSYAFHWVRQAPGKGLEWVAVISYDGSNQYYADSVKGRFTISRDNSKNTLYLQMNSLRADDTAVYYCARDLAIAVAGTWHYYNGMDVWGQGTTVTVSSDKTHTASTKGPSVFPLAPSSKSTSGGTAALGCLVKDYFPEPVTVSWNSGALTSGVHTFPAVLQSSGSLSSVVTVPSSSLGTQTYICNVNHKPSNTKVDKKVEPKSCDKTHTCPPCPAPELLGGPSVFLFPPKPKDTLMISRTPEVTCVVVDVSHEDPEVKFNWYVDGVEVHNAKTKPREEQYNSYVVSVLTVLHQDWLNGKEYKCKVSNKALPAPIEKTISKAKGQPREPQVCTLPPSRDELTKNQVSLSCAVKGFYPSDIAVEWESNGQPENNYKTTPPVLDSDGSFFLVSKLTVDKSRWQQGNVFSCSVLHEALHSHYTQKSLSLSPG

SEQ ID NO: 725 - protein, 332 aa, synthetic construct
  REGION 1..332: note = A19-61_B1-182 CODVL - peptide without signal
DIQMTQSPSSVSASVGDRVIITCRASQGISSWLAWYQQKPGKAPKVLIYDASSLQSGVPSRFSGSGYGTDFTLTISSLQPEDSATYYCQQAKSFPITFGQGTRLEIKDKTHTEIVLTQSPGTLSLSPGERATLSCRASQSVSSSYLAWYQQKPGQAPRLLIYGASSRATGFPDRFSGSGSGTDFTLTISRLEPEDFAVYYCQQYGNSPWTFGQGTKVEIRDKTHTRTVAAPSVFIFPPSDEQLKSGTASVVCLLNNFYPREAKVQWKVDNALQSGNSQESVTEQDSKDSTYSLSSTLTLSKADYEKHKVYACEVTHQGLSSPVTKSFNRGEC

SEQ ID NO: 726 - protein, 351 aa, synthetic construct
  REGION 1..351: note = A19-61_B1-182 CODVL - peptide with signal
MGWSCIILFLVATATGVHSDIQMTQSPSSVSASVGDRVIITCRASQGISSWLAWYQQKPGKAPKVLIYDASSLQSGVPSRFSGSGYGTDFTLTISSLQPEDSATYYCQQAKSFPITFGQGTRLEIKDKTHTEIVLTQSPGTLSLSPGERATLSCRASQSVSSSYLAWYQQKPGQAPRLLIYGASSRATGFPDRFSGSGSGTDFTLTISRLEPEDFAVYYCQQYGNSPWTFGQGTKVEIRDKTHTRTVAAPSVFIFPPSDEQLKSGTASVVCLLNNFYPREAKVQWKVDNALQSGNSQESVTEQDSKDSTYSLSSTLTLSKADYEKHKVYACEVTHQGLSSPVTKSFNRGEC

SEQ ID NO: 727 - protein, 450 aa, synthetic construct; identical to SEQ ID NO: 158
  REGION 1..450: note = A19-61 monoH knobLS - peptide without signal

SEQ ID NO: 728 - protein, 469 aa, synthetic construct; identical to SEQ ID NO: 159
  REGION 1..469: note = A19-61 monoH knobLS - peptide with signal

SEQ ID NO: 729 - protein, 214 aa, synthetic construct; identical to SEQ ID NO: 160
  REGION 1..214: note = A19-61 monoL - peptide without signal

SEQ ID NO: 730 - protein, 233 aa, synthetic construct; identical to SEQ ID NO: 161
  REGION 1..233: note = A19-61 monoL - peptide with signal

SEQ ID NO: 731 - protein, 580 aa, synthetic construct
  REGION 1..580: note = A23-58_A19-46 CODVH hole LS - peptide without signal
QVQLVESGGGVVQPGRSLRLSCAASGFTLSSYGMHWVRQAPGKGLEWVAVISYDGSNKYYVDSVKGRFTISRDNSKNTLYLQMNSLRAEDTAVYYCRWAYWELLPDYYYGMDVWGQGTTVTVSSDKTHTQMQLVQSGPEVKKPGTSVKVSCKASGFTFTSSAVQWVRQRQRLEWIGWIVVGSGNTNYAQKFQERVTITRDMSTSTAYMELSSLRSEDTAVYYCAAPNCSNVVCYDGFDIWGQGTMVTVSSDKTHTASTKGPSVFPLAPSSKSTSGGTAALGCLVKDYFPEPVTVSWNSGALTSGVHTFPAVLQSSGSLSSVVTVPSSSLGTQTYICNVNHKPSNTKVDKKVEPKSCDKTHTCPPCPAPELLGGPSVFLFPPKPKDTLMISRTPEVTCVVVDVSHEDPEVKFNWYVDGVEVHNAKTKPREEQYNSYVVSVLTVLHQDWLNGKEYKCKVSNKALPAPIEKTISKAKGQPREPQVCTLPPSRDELTKNQVSLSCAVKGFYPSDIAVEWESNGQPENNYKTTPPVLDSDGSFFLVSKLTVDKSRWQQGNVFSCSVLHEALHSHYTQKSLSLSPG

SEQ ID NO: 732 - protein, 599 aa, synthetic construct
  REGION 1..599: note = A23-58_A19-46 CODVH hole LS - peptide with signal
MGWSCIILFLVATATGVHSQVQLVESGGGVVQPGRSLRLSCAASGFTLSSYGMHWVRQAPGKGLEWVAVISYDGSNKYYVDSVKGRFTISRDNSKNTLYLQMNSLRAEDTAVYYCRWAYWELLPDYYYGMDVWGQGTTVTVSSDKTHTQMQLVQSGPEVKKPGTSVKVSCKASGFTFTSSAVQWVRQRQRLEWIGWIVVGSGNTNYAQKFQERVTITRDMSTSTAYMELSSLRSEDTAVYYCAAPNCSNVVCYDGFDIWGQGTMVTVSSDKTHTASTKGPSVFPLAPSSKSTSGGTAALGCLVKDYFPEPVTVSWNSGALTSGVHTFPAVLQSSGSLSSVVTVPSSSLGTQTYICNVNHKPSNTKVDKKVEPKSCDKTHTCPPCPAPELLGGPSVFLFPPKPKDTLMISRTPEVTCVVVDVSHEDPEVKFNWYVDGVEVHNAKTKPREEQYNSYVVSVLTVLHQDWLNGKEYKCKVSNKALPAPIEKTISKAKGQPREPQVCTLPPSRDELTKNQVSLSCAVKGFYPSDIAVEWESNGQPENNYKTTPPVLDSDGSFFLVSKLTVDKSRWQQGNVFSCSVLHEALHSHYTQKSLSLSPG

SEQ ID NO: 733 - protein, 578 aa, synthetic construct
  REGION 1..578: note = A23-58_A19-61__CODVH_holeLS - peptide without signal
QVQLVESGGGVVQPGRSLRLSCAASGFTFSSYAFHWVRQAPGKGLEWVAVISYDGSNQYYADSVKGRFTISRDNSKNTLYLQMNSLRADDTAVYYCARDLAIAVAGTWHYYNGMDVWGQGTTVTVSSDKTHTQMQLVQSGPEVKKPGTSVKVSCKASGFTFTSSAVQWVRQRQRLEWIGWIVVGSGNTNYAQKFQERVTITRDMSTSTAYMELSSLRSEDTAVYYCAAPNCSNVVCYDGFDIWGQGTMVTVSSASTKGPSVFPLAPSSKSTSGGTAALGCLVKDYFPEPVTVSWNSGALTSGVHTFPAVLQSSGSLSSVVTVPSSSLGTQTYICNVNHKPSNTKVDKKVEPKSCDKTHTCPPCPAPELLGGPSVFLFPPKPKDTLMISRTPEVTCVVVDVSHEDPEVKFNWYVDGVEVHNAKTKPREEQYNSYVVSVLTVLHQDWLNGKEYKCKVSNKALPAPIEKTISKAKGQPREPQVCTLPPSRDELTKNQVSLSCAVKGFYPSDIAVEWESNGQPENNYKTTPPVLDSDGSFFLVSKLTVDKSRWQQGNVFSCSVLHEALHSHYTQKSLSLSPG

SEQ ID NO: 734 - protein, 597 aa, synthetic construct
  REGION 1..597: note = A23-58_A19-61__CODVH_holeLS - peptide with signal
MGWSCIILFLVATATGVHSQVQLVESGGGVVQPGRSLRLSCAASGFTFSSYAFHWVRQAPGKGLEWVAVISYDGSNQYYADSVKGRFTISRDNSKNTLYLQMNSLRADDTAVYYCARDLAIAVAGTWHYYNGMDVWGQGTTVTVSSDKTHTQMQLVQSGPEVKKPGTSVKVSCKASGFTFTSSAVQWVRQRQRLEWIGWIVVGSGNTNYAQKFQERVTITRDMSTSTAYMELSSLRSEDTAVYYCAAPNCSNVVCYDGFDIWGQGTMVTVSSASTKGPSVFPLAPSSKSTSGGTAALGCLVKDYFPEPVTVSWNSGALTSGVHTFPAVLQSSGSLSSVVTVPSSSLGTQTYICNVNHKPSNTKVDKKVEPKSCDKTHTCPPCPAPELLGGPSVFLFPPKPKDTLMISRTPEVTCVVVDVSHEDPEVKFNWYVDGVEVHNAKTKPREEQYNSYVVSVLTVLHQDWLNGKEYKCKVSNKALPAPIEKTISKAKGQPREPQVCTLPPSRDELTKNQVSLSCAVKGFYPSDIAVEWESNGQPENNYKTTPPVLDSDGSFFLVSKLTVDKSRWQQGNVFSCSVLHEALHSHYTQKSLSLSPG

SEQ ID NO: 735 - protein, 577 aa, synthetic construct
  REGION 1..577: note = A23-58_A23-58 CODVH hole LS - peptide without signal
QMQLVQSGPEVKKPGTSVKVSCKASGFTFTSSAVQWVRQRQRLEWIGWIVVGSGNTNYAQKFQERVTITRDMSTSTAYMELSSLRSEDTAVYYCAAPNCSNVVCYDGFDIWGQGTMVTVSSDKTHTQMQLVQSGPEVKKPGTSVKVSCKASGFTFTSSAVQWVRQRQRLEWIGWIVVGSGNTNYAQKFQERVTITRDMSTSTAYMELSSLRSEDTAVYYCAAPNCSNVVCYDGFDIWGQGTMVTVSSDKTHTASTKGPSVFPLAPSSKSTSGGTAALGCLVKDYFPEPVTVSWNSGALTSGVHTFPAVLQSSGSLSSVVTVPSSSLGTQTYICNVNHKPSNTKVDKKVEPKSCDKTHTCPPCPAPELLGGPSVFLFPPKPKDTLMISRTPEVTCVVVDVSHEDPEVKFNWYVDGVEVHNAKTKPREEQYNSYVVSVLTVLHQDWLNGKEYKCKVSNKALPAPIEKTISKAKGQPREPQVCTLPPSRDELTKNQVSLSCAVKGFYPSDIAVEWESNGQPENNYKTTPPVLDSDGSFFLVSKLTVDKSRWQQGNVFSCSVLHEALHSHYTQKSLSLSPG

SEQ ID NO: 736 - protein, 596 aa, synthetic construct
  REGION 1..596: note = A23-58_A23-58 CODVH hole LS - peptide with signal
MGWSCIILFLVATATGVHSQMQLVQSGPEVKKPGTSVKVSCKASGFTFTSSAVQWVRQRQRLEWIGWIVVGSGNTNYAQKFQERVTITRDMSTSTAYMELSSLRSEDTAVYYCAAPNCSNVVCYDGFDIWGQGTMVTVSSDKTHTQMQLVQSGPEVKKPGTSVKVSCKASGFTFTSSAVQWVRQRQRLEWIGWIVVGSGNTNYAQKFQERVTITRDMSTSTAYMELSSLRSEDTAVYYCAAPNCSNVVCYDGFDIWGQGTMVTVSSDKTHTASTKGPSVFPLAPSSKSTSGGTAALGCLVKDYFPEPVTVSWNSGALTSGVHTFPAVLQSSGSLSSVVTVPSSSLGTQTYICNVNHKPSNTKVDKKVEPKSCDKTHTCPPCPAPELLGGPSVFLFPPKPKDTLMISRTPEVTCVVVDVSHEDPEVKFNWYVDGVEVHNAKTKPREEQYNSYVVSVLTVLHQDWLNGKEYKCKVSNKALPAPIEKTISKAKGQPREPQVCTLPPSRDELTKNQVSLSCAVKGFYPSDIAVEWESNGQPENNYKTTPPVLDSDGSFFLVSKLTVDKSRWQQGNVFSCSVLHEALHSHYTQKSLSLSPG

SEQ ID NO: 737 - protein, 444 aa, synthetic construct
  REGION 1..444: note = A23-58 monoH KnobLS - peptide without signal
QMQLVQSGPEVKKPGTSVKVSCKASGFTFTSSAVQWVRQRQRLEWIGWIVVGSGNTNYAQKFQERVTITRDMSTSTAYMELSSLRSEDTAVYYCAAPNCSNVVCYDGFDIWGQGTMVTVSSASTKGPSVFPLAPSSKSTSGGTAALGCLVKDYFPEPVTVSWNSGALTSGVHTFPAVLQSSGSLSSVVTVPSSSLGTQTYICNVNHKPSNTKVDKKVEPKSCDKTHTCPPCPAPELLGGPSVFLFPPKPKDTLMISRTPEVTCVVVDVSHEDPEVKFNWYVDGVEVHNAKTKPREEQYNSYVVSVLTVLHQDWLNGKEYKCKVSNKALPAPIEKTISKAKGQPREPQVYTLPPCRDELTKNQVSLWCLVKGFYPSDIAVEWESNGQPENNYKTTPPVLDSDGSFFKKLTVDKSRWQQGNVFSCSVLHEALHSHYTQKSLSLSPG

SEQ ID NO: 738 - protein, 463 aa, synthetic construct
  REGION 1..463: note = A23-58 monoH KnobLS - peptide with signal
MGWSCIILFLVATATGVHSQMQLVQSGPEVKKPGTSVKVSCKASGFTFTSSAVQWVRQRQRLEWIGWIVVGSGNTNYAQKFQERVTITRDMSTSTAYMELSSLRSEDTAVYYCAAPNCSNVVCYDGFDIWGQGTMVTVSSASTKGPSVFPLAPSSKSTSGGTAALGCLVKDYFPEPVTVSWNSGALTSGVHTFPAVLQSSGSLSSVVTVPSSSLGTQTYICNVNHKPSNTKVDKKVEPKSCDKTHTCPPCPAPELLGGPSVFLFPPKPKDTLMISRTPEVTCVVVDVSHEDPEVKFNWYVDGVEVHNAKTKPREEQYNSYVVSVLTVLHQDWLNGKEYKCKVSNKALPAPIEKTISKAKGQPREPQVYTLPPCRDELTKNQVSLWCLVKGFYPSDIAVEWESNGQPENNYKTTPPVLDSDGSFFKKLTVDKSRWQQGNVFSCSVLHEALHSHYTQKSLSLSPG

SEQ ID NO: 739 - protein, 580 aa, synthetic construct
  REGION 1..580: note = B1-182_A19-46 CODVH holeLS - peptide without signal
QVQLVESGGGVVQPGRSLRLSCAASGFTLSSYGMHWVRQAPGKGLEWVAVISYDGSNKYYVDSVKGRFTISRDNSKNTLYLQMNSLRAEDTAVYYCRWAYWELLPDYYYGMDVWGQGTTVTVSSDKTHTQMQLVQSGPEVKKPGTSVKVSCKASGFTFTSSAVQWVRQRQRLEWIGWIVVGSGNTNYAQKFQERVTITRDMSTSTAYMELSSLRSEDTAVYYCAAPYCSGGSCFDGFDIWGQGTMVTVSSDKTHTASTKGPSVFPLAPSSKSTSGGTAALGCLVKDYFPEPVTVSWNSGALTSGVHTFPAVLQSSGSLSSVVTVPSSSLGTQTYICNVNHKPSNTKVDKKVEPKSCDKTHTCPPCPAPELLGGPSVFLFPPKPKDTLMISRTPEVTCVVVDVSHEDPEVKFNWYVDGVEVHNAKTKPREEQYNSYVVSVLTVLHQDWLNGKEYKCKVSNKALPAPIEKTISKAKGQPREPQVCTLPPSRDELTKNQVSLSCAVKGFYPSDIAVEWESNGQPENNYKTTPPVLDSDGSFFLVSKLTVDKSRWQQGNVFSCSVLHEALHSHYTQKSLSLSPG

SEQ ID NO: 740 - protein, 599 aa, synthetic construct
  REGION 1..599: note = B1-182_A19-46 CODVH holeLS - peptide with signal
MGWSCIILFLVATATGVHSQVQLVESGGGVVQPGRSLRLSCAASGFTLSSYGMHWVRQAPGKGLEWVAVISYDGSNKYYVDSVKGRFTISRDNSKNTLYLQMNSLRAEDTAVYYCRWAYWELLPDYYYGMDVWGQGTTVTVSSDKTHTQMQLVQSGPEVKKPGTSVKVSCKASGFTFTSSAVQWVRQRQRLEWIGWIVVGSGNTNYAQKFQERVTITRDMSTSTAYMELSSLRSEDTAVYYCAAPYCSGGSCFDGFDIWGQGTMVTVSSDKTHTASTKGPSVFPLAPSSKSTSGGTAALGCLVKDYFPEPVTVSWNSGALTSGVHTFPAVLQSSGSLSSVVTVPSSSLGTQTYICNVNHKPSNTKVDKKVEPKSCDKTHTCPPCPAPELLGGPSVFLFPPKPKDTLMISRTPEVTCVVVDVSHEDPEVKFNWYVDGVEVHNAKTKPREEQYNSYVVSVLTVLHQDWLNGKEYKCKVSNKALPAPIEKTISKAKGQPREPQVCTLPPSRDELTKNQVSLSCAVKGFYPSDIAVEWESNGQPENNYKTTPPVLDSDGSFFLVSKLTVDKSRWQQGNVFSCSVLHEALHSHYTQKSLSLSPG

SEQ ID NO: 741 - protein, 335 aa, synthetic construct
  REGION 1..335: note = B1-182_A19-46 CODVL - peptide without signal
EIVLTQSPGTLSLSPGERATLSCRASQSVSSSYLAWYQQKPGQAPRLLIYGASSRATGFPDRFSGSGSGTDFTLTISRLEPEDFAVYYCQQYGNSPWTFGQGTKVEIRDKTHTQTVVTQEPSFSVSPGGTVTLTCGLSSGSVSTAYFPSWYQQTPGQAPRTLIYGTNTRSSGVPDRFSGSILGNKAALTITGAQADDESDYYCVLYMGRGIVVFGGGTKLTVLDKTHTRTVAAPSVFIFPPSDEQLKSGTASVVCLLNNFYPREAKVQWKVDNALQSGNSQESVTEQDSKDSTYSLSSTLTLSKADYEKHKVYACEVTHQGLSSPVTKSFNRGEC

SEQ ID NO: 742 - protein, 354 aa, synthetic construct
  REGION 1..354: note = B1-182_A19-46 CODVL - peptide with signal
MGWSCIILFLVATATGVHSEIVLTQSPGTLSLSPGERATLSCRASQSVSSSYLAWYQQKPGQAPRLLIYGASSRATGFPDRFSGSGSGTDFTLTISRLEPEDFAVYYCQQYGNSPWTFGQGTKVEIRDKTHTQTVVTQEPSFSVSPGGTVTLTCGLSSGSVSTAYFPSWYQQTPGQAPRTLIYGTNTRSSGVPDRFSGSILGNKAALTITGAQADDESDYYCVLYMGRGIVVFGGGTKLTVLDKTHTRTVAAPSVFIFPPSDEQLKSGTASVVCLLNNFYPREAKVQWKVDNALQSGNSQESVTEQDSKDSTYSLSSTLTLSKADYEKHKVYACEVTHQGLSSPVTKSFNRGEC

SEQ ID NO: 743 - protein, 332 aa, synthetic construct
  REGION 1..332: note = B1-182_A19-61 CODVL - peptide without signal
EIVLTQSPGTLSLSPGERATLSCRASQSVSSSYLAWYQQKPGQAPRLLIYGASSRATGFPDRFSGSGSGTDFTLTISRLEPEDFAVYYCQQYGNSPWTFGQGTKVEIRDKTHTDIQMTQSPSSVSASVGDRVIITCRASQGISSWLAWYQQKPGKAPKVLIYDASSLQSGVPSRFSGSGYGTDFTLTISSLQPEDSATYYCQQAKSFPITFGQGTRLEIKDKTHTRTVAAPSVFIFPPSDEQLKSGTASVVCLLNNFYPREAKVQWKVDNALQSGNSQESVTEQDSKDSTYSLSSTLTLSKADYEKHKVYACEVTHQGLSSPVTKSFNRGEC

SEQ ID NO: 744 - protein, 351 aa, synthetic construct
  REGION 1..351: note = B1-182_A19-61 CODVL - peptide with signal
MGWSCIILFLVATATGVHSEIVLTQSPGTLSLSPGERATLSCRASQSVSSSYLAWYQQKPGQAPRLLIYGASSRATGFPDRFSGSGSGTDFTLTISRLEPEDFAVYYCQQYGNSPWTFGQGTKVEIRDKTHTDIQMTQSPSSVSASVGDRVIITCRASQGISSWLAWYQQKPGKAPKVLIYDASSLQSGVPSRFSGSGYGTDFTLTISSLQPEDSATYYCQQAKSFPITFGQGTRLEIKDKTHTRTVAAPSVFIFPPSDEQLKSGTASVVCLLNNFYPREAKVQWKVDNALQSGNSQESVTEQDSKDSTYSLSSTLTLSKADYEKHKVYACEVTHQGLSSPVTKSFNRGEC

SEQ ID NO: 745 - protein, 577 aa, synthetic construct
  REGION 1..577: note = B1-182_B1-182 CODVH holeLS - peptide without signal
QMQLVQSGPEVKKPGTSVKVSCKASGFTFTSSAVQWVRQRQRLEWIGWIVVGSGNTNYAQKFQERVTITRDMSTSTAYMELSSLRSEDTAVYYCAAPYCSGGSCFDGFDIWGQGTMVTVSSDKTHTQMQLVQSGPEVKKPGTSVKVSCKASGFTFTSSAVQWVRQRQRLEWIGWIVVGSGNTNYAQKFQERVTITRDMSTSTAYMELSSLRSEDTAVYYCAAPYCSGGSCFDGFDIWGQGTMVTVSSDKTHTASTKGPSVFPLAPSSKSTSGGTAALGCLVKDYFPEPVTVSWNSGALTSGVHTFPAVLQSSGSLSSVVTVPSSSLGTQTYICNVNHKPSNTKVDKKVEPKSCDKTHTCPPCPAPELLGGPSVFLFPPKPKDTLMISRTPEVTCVVVDVSHEDPEVKFNWYVDGVEVHNAKTKPREEQYNSYVVSVLTVLHQDWLNGKEYKCKVSNKALPAPIEKTISKAKGQPREPQVCTLPPSRDELTKNQVSLSCAVKGFYPSDIAVEWESNGQPENNYKTTPPVLDSDGSFFLVSKLTVDKSRWQQGNVFSCSVLHEALHSHYTQKSLSLSPG

SEQ ID NO: 746 - protein, 596 aa, synthetic construct
  REGION 1..596: note = B1-182_B1-182 CODVH holeLS - peptide with signal
MGWSCIILFLVATATGVHSQMQLVQSGPEVKKPGTSVKVSCKASGFTFTSSAVQWVRQRQRLEWIGWIVVGSGNTNYAQKFQERVTITRDMSTSTAYMELSSLRSEDTAVYYCAAPYCSGGSCFDGFDIWGQGTMVTVSSDKTHTQMQLVQSGPEVKKPGTSVKVSCKASGFTFTSSAVQWVRQRQRLEWIGWIVVGSGNTNYAQKFQERVTITRDMSTSTAYMELSSLRSEDTAVYYCAAPYCSGGSCFDGFDIWGQGTMVTVSSDKTHTASTKGPSVFPLAPSSKSTSGGTAALGCLVKDYFPEPVTVSWNSGALTSGVHTFPAVLQSSGSLSSVVTVPSSSLGTQTYICNVNHKPSNTKVDKKVEPKSCDKTHTCPPCPAPELLGGPSVFLFPPKPKDTLMISRTPEVTCVVVDVSHEDPEVKFNWYVDGVEVHNAKTKPREEQYNSYVVSVLTVLHQDWLNGKEYKCKVSNKALPAPIEKTISKAKGQPREPQVCTLPPSRDELTKNQVSLSCAVKGFYPSDIAVEWESNGQPENNYKTTPPVLDSDGSFFLVSKLTVDKSRWQQGNVFSCSVLHEALHSHYTQKSLSLSPG

SEQ ID NO: 747 - protein, 333 aa, synthetic construct
  REGION 1..333: note = B1-182_B1-182 CODVL - peptide without signal
EIVLTQSPGTLSLSPGERATLSCRASQSVSSSYLAWYQQKPGQAPRLLIYGASSRATGFPDRFSGSGSGTDFTLTISRLEPEDFAVYYCQQYGNSPWTFGQGTKVEIRDKTHTEIVLTQSPGTLSLSPGERATLSCRASQSVSSSYLAWYQQKPGQAPRLLIYGASSRATGFPDRFSGSGSGTDFTLTISRLEPEDFAVYYCQQYGNSPWTFGQGTKVEIRDKTHTRTVAAPSVFIFPPSDEQLKSGTASVVCLLNNFYPREAKVQWKVDNALQSGNSQESVTEQDSKDSTYSLSSTLTLSKADYEKHKVYACEVTHQGLSSPVTKSFNRGEC

SEQ ID NO: 748 - protein, 352 aa, synthetic construct
  REGION 1..352: note = B1-182_B1-182 CODVL - peptide with signal
MGWSCIILFLVATATGVHSEIVLTQSPGTLSLSPGERATLSCRASQSVSSSYLAWYQQKPGQAPRLLIYGASSRATGFPDRFSGSGSGTDFTLTISRLEPEDFAVYYCQQYGNSPWTFGQGTKVEIRDKTHTEIVLTQSPGTLSLSPGERATLSCRASQSVSSSYLAWYQQKPGQAPRLLIYGASSRATGFPDRFSGSGSGTDFTLTISRLEPEDFAVYYCQQYGNSPWTFGQGTKVEIRDKTHTRTVAAPSVFIFPPSDEQLKSGTASVVCLLNNFYPREAKVQWKVDNALQSGNSQESVTEQDSKDSTYSLSSTLTLSKADYEKHKVYACEVTHQGLSSPVTKSFNRGEC

SEQ ID NO: 749 - protein, 444 aa, synthetic construct; identical to SEQ ID NO: 154
  REGION 1..444: note = B1-182_monoH_knobLS - peptide without signal

SEQ ID NO: 750 - protein, 463 aa, synthetic construct; identical to SEQ ID NO: 155
  REGION 1..463: note = B1-182_monoH_knobLS - peptide with signal

SEQ ID NO: 751 - protein, 214 aa, synthetic construct; identical to SEQ ID NO: 156
  REGION 1..214: note = B1-182_monoL - peptide without signal

SEQ ID NO: 752 - protein, 233 aa, synthetic construct; identical to SEQ ID NO: 157
  REGION 1..233: note = B1-182_monoL - peptide with signal

SEQ ID NO: 753 - protein, 583 aa, synthetic construct
  REGION 1..583: note = B1-182 A19-61 CODVH holeLS - peptide without signal
QVQLVESGGGVVQPGRSLRLSCAASGFTFSSYAFHWVRQAPGKGLEWVAVISYDGSNQYYADSVKGRFTISRDNSKNTLYLQMNSLRADDTAVYYCARDLAIAVAGTWHYYNGMDVWGQGTTVTVSSDKTHTQMQLVQSGPEVKKPGTSVKVSCKASGFTFTSSAVQWVRQRQRLEWIGWIVVGSGNTNYAQKFQERVTITRDMSTSTAYMELSSLRSEDTAVYYCAAPYCSGGSCFDGFDIWGQGTMVTVSSDKTHTASTKGPSVFPLAPSSKSTSGGTAALGCLVKDYFPEPVTVSWNSGALTSGVHTFPAVLQSSGSLSSVVTVPSSSLGTQTYICNVNHKPSNTKVDKKVEPKSCDKTHTCPPCPAPELLGGPSVFLFPPKPKDTLMISRTPEVTCVVVDVSHEDPEVKFNWYVDGVEVHNAKTKPREEQYNSYVVSVLTVLHQDWLNGKEYKCKVSNKALPAPIEKTISKAKGQPREPQVCTLPPSRDELTKNQVSLSCAVKGFYPSDIAVEWESNGQPENNYKTTPPVLDSDGSFFLVSKLTVDKSRWQQGNVFSCSVLHEALHSHYTQKSLSLSPG

SEQ ID NO: 754 - protein, 602 aa, synthetic construct
  REGION 1..602: note = B1-182 A19-61 CODVH holeLS - peptide with signal
MGWSCIILFLVATATGVHSQVQLVESGGGVVQPGRSLRLSCAASGFTFSSYAFHWVRQAPGKGLEWVAVISYDGSNQYYADSVKGRFTISRDNSKNTLYLQMNSLRADDTAVYYCARDLAIAVAGTWHYYNGMDVWGQGTTVTVSSDKTHTQMQLVQSGPEVKKPGTSVKVSCKASGFTFTSSAVQWVRQRQRLEWIGWIVVGSGNTNYAQKFQERVTITRDMSTSTAYMELSSLRSEDTAVYYCAAPYCSGGSCFDGFDIWGQGTMVTVSSDKTHTASTKGPSVFPLAPSSKSTSGGTAALGCLVKDYFPEPVTVSWNSGALTSGVHTFPAVLQSSGSLSSVVTVPSSSLGTQTYICNVNHKPSNTKVDKKVEPKSCDKTHTCPPCPAPELLGGPSVFLFPPKPKDTLMISRTPEVTCVVVDVSHEDPEVKFNWYVDGVEVHNAKTKPREEQYNSYVVSVLTVLHQDWLNGKEYKCKVSNKALPAPIEKTISKAKGQPREPQVCTLPPSRDELTKNQVSLSCAVKGFYPSDIAVEWESNGQPENNYKTTPPVLDSDGSFFLVSKLTVDKSRWQQGNVFSCSVLHEALHSHYTQKSLSLSPG

SEQ ID NO: 755 - DNA, 1824 bp, synthetic construct
  misc_feature 1..1824: note = A19-46_A23-58__CODVH_holeLS - DNA
  source 1..1824: mol_type = other DNA
atgggctggtcctgcatcatcctgtttctggtggccacagccaccggtgtccacagccagatgcagctggtgcagtccggccctgaggtgaaaaagcccggcacctctgtgaaggtctcctgcaaggccagcggctttaccttcacaagcagcgccgtgcagtgggtgcggcaggccagaggccaaagactggaatggatcggctggatcgtggtgggcagcggaaataccaactacgcccagaagttccaggagcgggtgacaatcaccagagatatgagcacatctaccgcttatatggaactgagctctctgagaagcgaggacaccgccgtgtactactgcgccgctcctaactgcagcaacgtggtttgttacgacggcttcgacatctggggccagggaacaatggtcaccgtgtcctctgataagacccacacacaggtccagctggtggaaagcggaggcggagttgttcagcctggcagaagcctgagactgagctgtgccgcctctggctttaccctgagcagctatggcatgcactgggttcgacaagcccctggcaaaggcctggaatgggttgccgtgatcagctacgacggcagcaacaagtactacgtggactccgtgaagggcagattcaccatcagccgggacaacagcaagaacaccctgtacctgcagatgaactccctgagagccgaagatacagccgtgtattactgtgccagaggctgggcctattgggagctgctgcccgattactactacggcatggatgtgtggggacagggaaccaccgtgaccgtgtctagcgacaagacacacaccgcctctacaaagggcccctccgtgtttcctctggctcccagcagcaagtctacaagcggaggaacagccgctctgggctgcctggtcaaggattactttcccgagcctgtgaccgtgtcctggaattctggcgctctgacaagcggcgtgcacacctttccagctgtgctgcaaagcagcggcctgtactctctgagcagcgtggtcacagtgcctagctctagcctgggcacccagacctacatctgcaatgtgaaccacaagcctagcaacaccaaggtggacaagaaggtggaacccaagagctgcgacaagacccacacctgtcctccatgtcctgctccagaactgctcggcggaccttctgtgttcctgtttcctccaaagcctaaggacaccctgatgatcagcagaacccctgaagtgacctgcgtggtggtggatgtgtctcacgaggaccccgaagtgaagttcaattggtacgtggacggcgtggaagtgcacaacgccaagaccaagcctagagaggaacagtacaacagcacctacagagtggtgtccgtgctgaccgtgctgcaccaggattggctgaacggcaaagagtacaagtgcaaggtgtccaacaaggccctgcctgctcctatcgagaaaaccatcagcaaggccaagggccagcctcgcgaacctcaagtctgtacactgcctcctagccgggacgagctgaccaagaatcaggtgtccctgagctgtgccgtgaagggcttttaccccagcgacattgccgtggaatgggagagcaatggccagcctgagaacaactacaagacaacccctcctgtgctggacagcgacggctcattcttcctggtgtccaagctgacagtggacaagtccagatggcagcagggcaacgtgttcagctgcagcgtgctgcatgaagccctgcacagccactacacccagaagtccctgtctctgtctcctggctga

SEQ ID NO: 756 - DNA, 1824 bp, synthetic construct
  misc_feature 1..1824: note = A19-46_B1-182 CODVH holeLS - DNA
  source 1..1824: mol_type = other DNA
atgggctggtcctgcatcatcctgtttctggtggccacagccaccggtgtccacagccagatgcagctggtgcagtctggccccgaagtgaagaaacctggcaccagcgtgaaggtgtcctgcaaggccagcggcttcacctttacaagctctgccgtgcagtgggtccgacaggctagaggacaacggctggaatggatcggctggatcgttgtcggcagcggcaacaccaattacgcccagaaattccaagagcgcgtgaccatcaccagagacatgagcaccagcaccgcctacatggaactgagcagcctgagaagcgaggacaccgccgtgtactattgcgccgctccttactgtagcggcggcagctgctttgacggctttgacatttggggccagggcaccatggtcaccgtgtcctctgataagacccacacacaggtccagctggtggaaagcggaggcggagttgttcagcctggcagaagcctgagactgagctgtgccgcctctggctttaccctgagcagctatggcatgcactgggttcgacaagcccctggcaaaggcctggaatgggttgccgtgatcagctacgacggcagcaacaagtactacgtggactccgtgaagggcagattcaccatcagccgggacaacagcaagaacaccctgtacctgcagatgaactccctgagagccgaagatacagccgtgtattactgtgccagaggctgggcctattgggagctgctgcccgattactactacggcatggatgtgtggggacagggaaccaccgtgaccgtgtctagcgacaagacacacaccgcctctacaaagggcccctccgtgtttcctctggctcccagcagcaagtctacaagcggaggaacagccgctctgggctgcctggtcaaggattactttcccgagcctgtgaccgtgtcctggaattctggcgctctgacaagcggcgtgcacacctttccagctgtgctgcaaagcagcggcctgtactctctgagcagcgtggtcacagtgcctagctctagcctgggcacccagacctacatctgcaatgtgaaccacaagcctagcaacaccaaggtggacaagaaggtggaacccaagagctgcgacaagacccacacctgtcctccatgtcctgctccagaactgctcggcggaccttctgtgttcctgtttcctccaaagcctaaggacaccctgatgatcagcagaacccctgaagtgacctgcgtggtggtggatgtgtctcacgaggaccccgaagtgaagttcaattggtacgtggacggcgtggaagtgcacaacgccaagaccaagcctagagaggaacagtacaacagcacctacagagtggtgtccgtgctgaccgtgctgcaccaggattggctgaacggcaaagagtacaagtgcaaggtgtccaacaaggccctgcctgctcctatcgagaaaaccatcagcaaggccaagggccagcctcgcgaacctcaagtctgtacactgcctcctagccgggacgagctgaccaagaatcaggtgtccctgagctgtgccgtgaagggcttttaccccagcgacattgccgtggaatgggagagcaatggccagcctgagaacaactacaagacaacccctcctgtgctggacagcgacggctcattcttcctggtgtccaagctgacagtggacaagtccagatggcagcagggcaacgtgttcagctgcagcgtgctgcatgaagccctgcacagccactacacccagaagtccctgtctctgtctcctggctga

SEQ ID NO: 757 - DNA, 1065 bp, synthetic construct
  misc_feature 1..1065: note = A19-46_B1-182 CODVL - DNA
  source 1..1065: mol_type = other DNA
atgggctggtcctgcatcatcctgtttctggtggccacagccaccggtgtccacagccagaccgtggtcacacaagagcctagcttctccgtgtctcctggcggcacagtgacactgacatgtggccttagcagcggcagcgtgtccaccgcctattttcccagctggtatcagcagacccctggacaggctccccggacactgatctacggcaccaataccagatccagcggcgtgcccgatagattcagcggctctatcctgggcaacaaggccgcactgacaatcacaggcgcccaggccgatgacgagagcgattactactgcgtgctgtacatgggcagaggcatcgtggtttttggcggaggcaccaagctgaccgtgctggataagacccacaccgagatcgtgctgacacagagccctggcacactgtcactgtctccaggcgaaagagccacactgagctgtagagccagccagagcgtgtcctctagctacctggcctggtatcaacaaaagcccggacaggcccctcggctgctgatatatggtgcctctagcagagccaccggctttcccgacagattttctggcagcggaagcggcaccgacttcaccctgacaatctccagactggaacccgaggacttcgccgtgtactactgtcagcagtacggcaacagcccctggacctttggccagggcacaaaggtggaaatccgggacaagacacacacccgtacggtggccgctcctagcgtgttcatcttcccaccttccgacgagcagctgaagtctggcacagcctctgtcgtgtgcctgctgaacaacttctaccccagagaagccaaggtgcagtggaaggtggacaacgccctgcagagcggcaatagccaagagagcgtgaccgagcaggacagcaaggactctacctacagcctgagcagcaccctgacactgagcaaggccgactacgagaagcacaaagtgtacgcctgcgaagtgacccaccagggcctttctagccctgtgaccaagagcttcaaccggggcgaatgttga

SEQ ID NO: 758 - DNA, 1425 bp, synthetic construct
  misc_feature 1..1425: note = A19-46 monoH knobLS - DNA
  source 1..1425: mol_type = other DNA
atgggctggtcctgcatcatcctgtttctggtggccacagccaccggtgtccacagccaggtgcagctggttgaatctggtggcggagttgtgcagcctggcagaagcctgagactgtcttgtgccgccagcggctttaccctgagcagctatggaatgcactgggtccgacaggcccctggcaaaggacttgaatgggtcgccgtgatcagctacgacggcagcaacaagtactacgtggacagcgtgaagggcagattcaccatcagccgggacaacagcaagaacaccctgtacctgcagatgaacagcctgagagccgaggacaccgccgtgtactattgtgccagaggctgggcctattgggagctgctgcccgattactactacggcatggatgtgtggggccagggcaccacagtgacagtctcttctgcctctacaaagggcccctccgtgtttcctctggctcccagcagcaagtctacaagcggaggaacagccgctctgggctgcctggtcaaggattactttcccgagcctgtgaccgtgtcctggaattctggcgctctgacaagcggcgtgcacacctttccagctgtgctgcaaagcagcggcctgtactctctgagcagcgtggtcacagtgcctagctctagcctgggcacccagacctacatctgcaatgtgaaccacaagcctagcaacaccaaggtggacaagaaggtggaacccaagagctgcgacaagacccacacctgtcctccatgtcctgctccagaactgctcggcggaccttctgtgttcctgtttcctccaaagcctaaggacaccctgatgatcagcagaacccctgaagtgacctgcgtggtggtggatgtgtctcacgaggaccccgaagtgaagttcaattggtacgtggacggcgtggaagtgcacaacgccaagaccaagcctagagaggaacagtacaacagcacctacagagtggtgtccgtgctgaccgtgctgcaccaggattggctgaacggcaaagagtacaagtgcaaggtgtccaacaaggccctgcctgctcctatcgagaaaaccatcagcaaggccaagggccagcctagggaaccccaggtttacacccttcctccatgccgggatgagctgaccaagaaccaggtgtccctgtggtgtctcgtgaagggcttctaccccagcgacattgccgtggaatgggagagcaatggccagcctgagaacaactacaagacaacccctcctgtgctggacagcgacggctcattcttcctgtacagcaagctgacagtggacaagtccagatggcagcagggcaacgtgttcagctgcagcgtgctgcatgaagccctgcacagccactacacccagaagtccctgtctctgtctcctggctga

SEQ ID NO: 759 - DNA, 711 bp, synthetic construct
  misc_feature 1..711: note = A19-46 monoL - DNA
  source 1..711: mol_type = other DNA
atgggctggtcctgcatcatcctgtttctggtggccacagccaccggtgtccacagccagaccgtggtcacacaagagcctagcttctccgtgtctcctggcggcacagtgacactgacatgtggccttagcagcggcagcgtgtccaccgcctattttcccagctggtatcagcagacccctggacaggctccccggacactgatctacggcaccaataccagatccagcggcgtgcccgatagattcagcggctctatcctgggcaacaaggccgcactgacaatcacaggcgcccaggccgatgacgagagcgattactactgcgtgctgtacatgggcagaggcatcgtggtttttggcggaggcaccaagctgaccgttctgcgtacggtggccgctcctagcgtgttcatcttcccaccttccgacgagcagctgaagtctggcacagcctctgtcgtgtgcctgctgaacaacttctaccccagagaagccaaggtgcagtggaaggtggacaacgccctgcagagcggcaatagccaagagagcgtgaccgagcaggacagcaaggactctacctacagcctgagcagcaccctgacactgagcaaggccgactacgagaagcacaaagtgtacgcctgcgaagtgacccaccagggcctttctagccctgtgaccaagagcttcaaccggggcgaatgttga

SEQ ID NO: 760 - DNA, 1827 bp, synthetic construct
  misc_feature 1..1827: note = A19-61_A23-58 CODVH hole LS - DNA
  source 1..1827: mol_type = other DNA
atgggctggtcctgcatcatcctgtttctggtggccacagccaccggtgtccacagccagatgcagctggtgcagtccggccctgaggtgaaaaagcccggcacctctgtgaaggtctcctgcaaggccagcggctttaccttcacaagcagcgccgtgcagtgggtgcggcaggccagaggccaaagactggaatggatcggctggatcgtggtgggcagcggaaataccaactacgcccagaagttccaggagcgggtgacaatcaccagagatatgagcacatctaccgcttatatggaactgagctctctgagaagcgaggacaccgccgtgtactactgcgccgctcctaactgcagcaacgtggtttgttacgacggcttcgacatctggggccagggaacaatggtcaccgtgtcctctgataagacccacacacaggtccagctggtggaaagcggaggcggagttgttcagcctggcagaagcctgagactgagctgtgccgcctctggctttaccttcagcagctacgccttccactgggttcgacaagcccctggcaaaggcctggaatgggttgccgtgatcagctacgacggcagcaaccagtactacgccgactccgtgaagggcagattcaccatcagccgggacaacagcaagaacaccctgtacctgcagatgaacagcctgagggccgatgatacagccgtgtattactgtgcccgcgacctggccattgccgtggctggaacatggcactactacaacggcatggacgtgtggggacagggaaccaccgtgaccgtgtctagcgacaagacacacaccgcctctacaaagggcccctccgtgtttcctctggctcccagcagcaagtctacaagcggaggaacagccgctctgggctgcctggtcaaggattactttcccgagcctgtgaccgtgtcctggaattctggcgctctgacaagcggcgtgcacacctttccagctgtgctgcaaagcagcggcctgtactctctgagcagcgtggtcacagtgcctagctctagcctgggcacccagacctacatctgcaatgtgaaccacaagcctagcaacaccaaggtggacaagaaggtggaacccaagagctgcgacaagacccacacctgtcctccatgtcctgctccagaactgctcggcggaccttctgtgttcctgtttcctccaaagcctaaggacaccctgatgatcagcagaacccctgaagtgacctgcgtggtggtggatgtgtctcacgaggaccccgaagtgaagttcaattggtacgtggacggcgtggaagtgcacaacgccaagaccaagcctagagaggaacagtacaacagcacctacagagtggtgtccgtgctgaccgtgctgcaccaggattggctgaacggcaaagagtacaagtgcaaggtgtccaacaaggccctgcctgctcctatcgagaaaaccatcagcaaggccaagggccagcctcgcgaacctcaagtctgtacactgcctcctagccgggacgagctgaccaagaatcaggtgtccctgagctgtgccgtgaagggcttttaccccagcgacattgccgtggaatgggagagcaatggccagcctgagaacaactacaagacaacccctcctgtgctggacagcgacggctcattcttcctggtgtccaagctgacagtggacaagtccagatggcagcagggcaacgtgttcagctgcagcgtgctgcatgaagccctgcacagccactacacccagaagtccctgtctctgtctcctggctga

SEQ ID NO: 761 - DNA, 1827 bp, synthetic construct
  misc_feature 1..1827: note = A19-61_B1-182 CODVH holeLS - DNA
  source 1..1827: mol_type = other DNA
atgggctggtcctgcatcatcctgtttctggtggccacagccaccggtgtccacagccagatgcagctggtgcagtctggccccgaagtgaagaaacctggcaccagcgtgaaggtgtcctgcaaggccagcggcttcacctttacaagctctgccgtgcagtgggtccgacaggctagaggacaacggctggaatggatcggctggatcgttgtcggcagcggcaacaccaattacgcccagaaattccaagagcgcgtgaccatcaccagagacatgagcaccagcaccgcctacatggaactgagcagcctgagaagcgaggacaccgccgtgtactattgcgccgctccttactgtagcggcggcagctgctttgacggctttgacatttggggccagggcaccatggtcaccgtgtcctctgataagacccacacacaggtccagctggtggaaagcggaggcggagttgttcagcctggcagaagcctgagactgagctgtgccgcctctggctttaccttcagcagctacgccttccactgggttcgacaagcccctggcaaaggcctggaatgggttgccgtgatcagctacgacggcagcaaccagtactacgccgactccgtgaagggcagattcaccatcagccgggacaacagcaagaacaccctgtacctgcagatgaacagcctgagggccgatgatacagccgtgtattactgtgcccgcgacctggccattgccgtggctggaacatggcactactacaacggcatggacgtgtggggacagggaaccaccgtgaccgtgtctagcgacaagacacacaccgcctctacaaagggcccctccgtgtttcctctggctcccagcagcaagtctacaagcggaggaacagccgctctgggctgcctggtcaaggattactttcccgagcctgtgaccgtgtcctggaattctggcgctctgacaagcggcgtgcacacctttccagctgtgctgcaaagcagcggcctgtactctctgagcagcgtggtcacagtgcctagctctagcctgggcacccagacctacatctgcaatgtgaaccacaagcctagcaacaccaaggtggacaagaaggtggaacccaagagctgcgacaagacccacacctgtcctccatgtcctgctccagaactgctcggcggaccttctgtgttcctgtttcctccaaagcctaaggacaccctgatgatcagcagaacccctgaagtgacctgcgtggtggtggatgtgtctcacgaggaccccgaagtgaagttcaattggtacgtggacggcgtggaagtgcacaacgccaagaccaagcctagagaggaacagtacaacagcacctacagagtggtgtccgtgctgaccgtgctgcaccaggattggctgaacggcaaagagtacaagtgcaaggtgtccaacaaggccctgcctgctcctatcgagaaaaccatcagcaaggccaagggccagcctcgcgaacctcaagtctgtacactgcctcctagccgggacgagctgaccaagaatcaggtgtccctgagctgtgccgtgaagggcttttaccccagcgacattgccgtggaatgggagagcaatggccagcctgagaacaactacaagacaacccctcctgtgctggacagcgacggctcattcttcctggtgtccaagctgacagtggacaagtccagatggcagcagggcaacgtgttcagctgcagcgtgctgcatgaagccctgcacagccactacacccagaagtccctgtctctgtctcctggctga

SEQ ID NO: 762 - DNA, 1056 bp, synthetic construct
  misc_feature 1..1056: note = A19-61_B1-182 CODVL - DNA
  source 1..1056: mol_type = other DNA
atgggctggtcctgcatcatcctgtttctggtggccacagccaccggtgtccacagcgacatccagatgacacagagccctagcagcgtgtccgcctctgtgggagacagagtgatcatcacctgtagagccagccagggcatcagctcttggctggcttggtatcagcagaagcctggcaaggcccctaaggtgctgatctacgatgccagctctctgcagtctggcgtgcccagcagattttctggcagcggctacggcaccgacttcaccctgaccatatctagcctgcagcctgaggacagcgccacctactattgtcagcaggccaagtctttccccatcaccttcggccagggcaccagactggaaatcaaggacaagacccacaccgagatcgtgctgacccagtctcctggcacactgtcactgtctccaggcgagagagccacactgagctgtagagcttctcagagcgtgtccagcagctacctcgcctggtatcaacaaaagcccggacaggctccccggctgctgatatatggtgcctctagcagagccaccggctttcccgatagattcagcggctctggctctggcacagatttcacactgacaatcagcaggctggaacccgaggacttcgccgtgtattactgccagcagtacggcaacagcccctggacatttggccagggaacaaaggtggaaatccgcgataagacacacacccgtacggtggccgctcctagcgtgttcatcttcccaccttccgacgagcagctgaagtctggcacagcctctgtcgtgtgcctgctgaacaacttctaccccagagaagccaaggtgcagtggaaggtggacaacgccctgcagagcggcaatagccaagagagcgtgaccgagcaggacagcaaggactctacctacagcctgagcagcaccctgacactgagcaaggccgactacgagaagcacaaagtgtacgcctgcgaagtgacccaccagggcctttctagccctgtgaccaagagcttcaaccggggcgaatgttga

SEQ ID NO: 763 - DNA, 1428 bp, synthetic construct
  misc_feature 1..1428: note = A19-61 monoH knobLS - DNA
  source 1..1428: mol_type = other DNA
atgggctggtcctgcatcatcctgtttctggtggccacagccaccggtgtccacagccaggtgcagctggttgaatctggtggcggagttgtgcagcctggcagaagcctgagactgtcttgtgccgccagcggcttcacctttagcagctacgccttccactgggtccgacaggcacctggcaaaggccttgaatgggtcgccgtgatcagctacgacggcagcaatcagtactacgccgacagcgtgaagggcagattcaccatcagccgggacaacagcaagaacaccctgtacctgcagatgaacagcctgagagccgacgacaccgccgtgtactattgtgcccgcgatctggccattgccgtggccggaacatggcactactacaacggcatggatgtgtggggccagggcaccacagtgacagtctcttctgcctctacaaagggcccctccgtgtttcctctggctcccagcagcaagtctacaagcggaggaacagccgctctgggctgcctggtcaaggattactttcccgagcctgtgaccgtgtcctggaattctggcgctctgacaagcggcgtgcacacctttccagctgtgctgcaaagcagcggcctgtactctctgagcagcgtggtcacagtgcctagctctagcctgggcacccagacctacatctgcaatgtgaaccacaagcctagcaacaccaaggtggacaagaaggtggaacccaagagctgcgacaagacccacacctgtcctccatgtcctgctccagaactgctcggcggaccttctgtgttcctgtttcctccaaagcctaaggacaccctgatgatcagcagaacccctgaagtgacctgcgtggtggtggatgtgtctcacgaggaccccgaagtgaagttcaattggtacgtggacggcgtggaagtgcacaacgccaagaccaagcctagagaggaacagtacaacagcacctacagagtggtgtccgtgctgaccgtgctgcaccaggattggctgaacggcaaagagtacaagtgcaaggtgtccaacaaggccctgcctgctcctatcgagaaaaccatcagcaaggccaagggccagcctagggaaccccaggtttacacccttcctccatgccgggatgagctgaccaagaaccaggtgtccctgtggtgtctcgtgaagggcttctaccccagcgacattgccgtggaatgggagagcaatggccagcctgagaacaactacaagacaacccctcctgtgctggacagcgacggctcattcttcctgtacagcaagctgacagtggacaagtccagatggcagcagggcaacgtgttcagctgcagcgtgctgcatgaagccctgcacagccactacacccagaagtccctgtctctgtctcctggctga

SEQ ID NO: 764 - DNA, 702 bp, synthetic construct
  misc_feature 1..702: note = A19-61 monoL - DNA
  source 1..702: mol_type = other DNA
atgggctggtcctgcatcatcctgtttctggtggccacagccaccggtgtccacagcgacatccagatgacacagagccctagcagcgtgtccgcctctgtgggagacagagtgatcatcacctgtagagccagccagggcatcagctcttggctggcttggtatcagcagaagcctggcaaggcccctaaggtgctgatctacgatgccagctctctgcagtctggcgtgcccagcagattttctggcagcggctacggcaccgacttcaccctgaccatatctagcctgcagcctgaggacagcgccacctactattgtcagcaggccaagtctttccccatcaccttcggccagggcaccagactggaaatcaagcgtacggtggccgctcctagcgtgttcatcttcccaccttccgacgagcagctgaagtctggcacagcctctgtcgtgtgcctgctgaacaacttctaccccagagaagccaaggtgcagtggaaggtggacaacgccctgcagagcggcaatagccaagagagcgtgaccgagcaggacagcaaggactctacctacagcctgagcagcaccctgacactgagcaaggccgactacgagaagcacaaagtgtacgcctgcgaagtgacccaccagggcctttctagccctgtgaccaagagcttcaaccggggcgaatgttga

SEQ ID NO: 765 - DNA, 1824 bp, synthetic construct
  misc_feature 1..1824: note = A23-58_A19-46 CODVH hole LS - DNA
  source 1..1824: mol_type = other DNA
atgggctggtcctgcatcatcctgtttctggtggccacagccaccggtgtccacagccaggtgcagctggttgaatctggtggcggagttgtgcagcctggcagaagcctgagactgtcttgtgccgccagcggctttaccctgagcagctatggaatgcactgggtccgacaggcccctggcaaaggacttgaatgggtcgccgtgatcagctacgacggcagcaacaagtactacgtggacagcgtgaagggcagattcaccatcagccgggacaacagcaagaacaccctgtacctgcagatgaacagcctgagagccgaggacaccgccgtgtactattgtgccagaggctgggcctattgggagctgctgcccgattactactacggcatggatgtgtggggccagggcaccacagtgaccgtgtctagcgataagacccacacacaaatgcagctggtgcagagcggccctgaggtgaaaaagcccggcacatctgtgaaggtgtcctgcaaggccagcggatttaccttcaccagctccgccgtgcagtgggtgcggcaggccagaggccagcggctggaatggatcggatggatcgtggtgggcagcggcaacaccaactacgcccagaagttccaggagagagtgaccatcacaagagatatgagcacaagcactgcttatatggaactgagcagcctgagaagcgaggacaccgccgtgtactactgcgccgctcctaattgcagcaacgtggtttgttacgacggcttcgacatctggggccagggcaccatggtcaccgtgtcttctgacaagacacacaccgcctctacaaagggcccctccgtgtttcctctggctcccagcagcaagtctacaagcggaggaacagccgctctgggctgcctggtcaaggattactttcccgagcctgtgaccgtgtcctggaattctggcgctctgacaagcggcgtgcacacctttccagctgtgctgcaaagcagcggcctgtactctctgagcagcgtggtcacagtgcctagctctagcctgggcacccagacctacatctgcaatgtgaaccacaagcctagcaacaccaaggtggacaagaaggtggaacccaagagctgcgacaagacccacacctgtcctccatgtcctgctccagaactgctcggcggaccttctgtgttcctgtttcctccaaagcctaaggacaccctgatgatcagcagaacccctgaagtgacctgcgtggtggtggatgtgtctcacgaggaccccgaagtgaagttcaattggtacgtggacggcgtggaagtgcacaacgccaagaccaagcctagagaggaacagtacaacagcacctacagagtggtgtccgtgctgaccgtgctgcaccaggattggctgaacggcaaagagtacaagtgcaaggtgtccaacaaggccctgcctgctcctatcgagaaaaccatcagcaaggccaagggccagcctcgcgaacctcaagtctgtacactgcctcctagccgggacgagctgaccaagaatcaggtgtccctgagctgtgccgtgaagggcttttaccccagcgacattgccgtggaatgggagagcaatggccagcctgagaacaactacaagacaacccctcctgtgctggacagcgacggctcattcttcctggtgtccaagctgacagtggacaagtccagatggcagcagggcaacgtgttcagctgcagcgtgctgcatgaagccctgcacagccactacacccagaagtccctgtctctgtctcctggctga

SEQ ID NO: 766 - skipped

SEQ ID NO: 767 - DNA, 1812 bp, synthetic construct
  misc_feature 1..1812: note = A23-58_A19-61__CODVH_holeLS - DNA
  source 1..1812: mol_type = other DNA
atgggctggtcctgcatcatcctgtttctggtggccacagccaccggtgtccacagccaggtgcagctggttgaatctggtggcggagttgtgcagcctggcagaagcctgagactgtcttgtgccgccagcggcttcacctttagcagctacgccttccactgggtccgacaggcacctggcaaaggccttgaatgggtcgccgtgatcagctacgacggcagcaatcagtactacgccgacagcgtgaagggcagattcaccatcagccgggacaacagcaagaacaccctgtacctgcagatgaacagcctgagagccgacgacaccgccgtgtactattgtgcccgcgatctggccattgccgtggccggaacatggcactactacaacggcatggatgtgtggggccagggcaccacagtgaccgtgtctagcgataagacccacacacaaatgcagctggtgcagagcggccctgaggtgaaaaagcccggcacatctgtgaaggtgtcctgcaaggccagcggatttaccttcaccagctccgccgtgcagtgggtgcggcaggccagaggccagcggctggaatggatcggatggatcgtggtgggcagcggcaacaccaactacgcccagaagttccaggagagagtgaccatcacaagagatatgagcacaagcactgcttatatggaactgagcagcctgagaagcgaggacaccgccgtgtactactgcgccgctcctaattgcagcaacgtggtttgttacgacggcttcgacatctggggccagggcaccatggtcaccgtgtcttctgcctctacaaagggcccctccgtgtttcctctggctcccagcagcaagtctacaagcggaggaacagccgctctgggctgcctggtcaaggattactttcccgagcctgtgaccgtgtcctggaattctggcgctctgacaagcggcgtgcacacctttccagctgtgctgcaaagcagcggcctgtactctctgagcagcgtggtcacagtgcctagctctagcctgggcacccagacctacatctgcaatgtgaaccacaagcctagcaacaccaaggtggacaagaaggtggaacccaagagctgcgacaagacccacacctgtcctccatgtcctgctccagaactgctcggcggaccttctgtgttcctgtttcctccaaagcctaaggacaccctgatgatcagcagaacccctgaagtgacctgcgtggtggtggatgtgtctcacgaggaccccgaagtgaagttcaattggtacgtggacggcgtggaagtgcacaacgccaagaccaagcctagagaggaacagtacaacagcacctacagagtggtgtccgtgctgaccgtgctgcaccaggattggctgaacggcaaagagtacaagtgcaaggtgtccaacaaggccctgcctgctcctatcgagaaaaccatcagcaaggccaagggccagcctcgcgaacctcaagtctgtacactgcctcctagccgggacgagctgaccaagaatcaggtgtccctgagctgtgccgtgaagggcttttaccccagcgacattgccgtggaatgggagagcaatggccagcctgagaacaactacaagacaacccctcctgtgctggacagcgacggctcattcttcctggtgtccaagctgacagtggacaagtccagatggcagcagggcaacgtgttcagctgcagcgtgctgcatgaagccctgcacagccactacacccagaagtccctgtctctgtctcctggctga

SEQ ID NO: 768 - DNA, 1815 bp, synthetic construct
  misc_feature 1..1815: note = A23-58_A23-58 CODVH hole LS - DNA
  source 1..1815: mol_type = other DNA
atgggctggtcctgcatcatcctgtttctggtggccacagccaccggtgtccacagccaaatgcagctggtgcagagcggccctgaggtgaaaaagcccggcacatctgtgaaggtgtcctgcaaggccagcggatttaccttcaccagctccgccgtgcagtgggtgcggcaggccagaggccagcggctggaatggatcggatggatcgtggtgggcagcggcaacaccaactacgcccagaagttccaggagagagtgaccatcacaagagatatgagcacaagcactgcttatatggaactgagcagcctgagaagcgaggacaccgccgtgtactactgcgccgctcctaattgcagcaacgtggtttgttacgacggcttcgacatctggggccagggcaccatggtcaccgtgtcttctgataagacccacacccagatgcagctggtgcagagcggacctgaggtgaaaaagcccggcaccagcgtgaaggtgtcttgcaaggccagcggcttcaccttcacatctagcgccgtgcagtgggtcagacaggccagaggccaaagactggaatggatcggatggatcgtggtgggcagcggcaacaccaactacgcccagaagttccaggagcgggtgaccatcacccgggacatgagcacctctacagcttatatggaactgagcagcctgagaagcgaggacaccgccgtgtactactgcgccgctcctaattgcagcaacgtggtttgttacgacggctttgatatctggggccagggcacaatggtgacagtgtcctccgacaagacccacaccgcctctacaaagggcccctccgtgtttcctctggctcccagcagcaagtctacaagcggaggaacagccgctctgggctgcctggtcaaggattactttcccgagcctgtgaccgtgtcctggaattctggcgctctgacaagcggcgtgcacacctttccagctgtgctgcaaagcagcggcctgtactctctgagcagcgtggtcacagtgcctagctctagcctgggcacccagacctacatctgcaatgtgaaccacaagcctagcaacaccaaggtggacaagaaggtggaacccaagagctgcgacaagacccacacctgtcctccatgtcctgctccagaactgctcggcggaccttctgtgttcctgtttcctccaaagcctaaggacaccctgatgatcagcagaacccctgaagtgacctgcgtggtggtggatgtgtctcacgaggaccccgaagtgaagttcaattggtacgtggacggcgtggaagtgcacaacgccaagaccaagcctagagaggaacagtacaacagcacctacagagtggtgtccgtgctgaccgtgctgcaccaggattggctgaacggcaaagagtacaagtgcaaggtgtccaacaaggccctgcctgctcctatcgagaaaaccatcagcaaggccaagggccagcctcgcgaacctcaagtctgtacactgcctcctagccgggacgagctgaccaagaatcaggtgtccctgagctgtgccgtgaagggcttttaccccagcgacattgccgtggaatgggagagcaatggccagcctgagaacaactacaagacaacccctcctgtgctggacagcgacggctcattcttcctggtgtccaagctgacagtggacaagtccagatggcagcagggcaacgtgttcagctgcagcgtgctgcatgaagccctgcacagccactacacccagaagtccctgtctctgtctcctggctga

SEQ ID NO: 769 - DNA, 1416 bp, synthetic construct
  misc_feature 1..1416: note = A23-58 monoH KnobLS - DNA
  source 1..1416: mol_type = other DNA
atgggctggtcctgcatcatcctgtttctggtggccacagccaccggtgtccacagccagatgcagctggtgcagtccggccctgaggtgaaaaagcccggcacctctgtgaaggtctcctgcaaggccagcggctttaccttcacaagcagcgccgtgcagtgggtgcggcaggccagaggccaaagactggaatggatcggctggatcgtggtgggcagcggaaataccaactacgcccagaagttccaggagcgggtgacaatcaccagagatatgagcacatctaccgcttatatggaactgagctctctgagaagcgaggacaccgccgtgtactactgcgccgctcctaactgcagcaacgtggtttgttacgacggcttcgacatctggggccagggaacaatggtcaccgttagctctgcctctacaaagggcccctccgtgtttcctctggctcccagcagcaagtctacaagcggaggaacagccgctctgggctgcctggtcaaggattactttcccgagcctgtgaccgtgtcctggaattctggcgctctgacaagcggcgtgcacacctttccagctgtgctgcaaagcagcggcctgtactctctgagcagcgtggtcacagtgcctagctctagcctgggcacccagacctacatctgcaatgtgaaccacaagcctagcaacaccaaggtggacaagaaggtggaacccaagagctgcgacaagacccacacctgtcctccatgtcctgctccagaactgctcggcggaccttctgtgttcctgtttcctccaaagcctaaggacaccctgatgatcagcagaacccctgaagtgacctgcgtggtggtggatgtgtctcacgaggaccccgaagtgaagttcaattggtacgtggacggcgtggaagtgcacaacgccaagaccaagcctagagaggaacagtacaacagcacctacagagtggtgtccgtgctgaccgtgctgcaccaggattggctgaacggcaaagagtacaagtgcaaggtgtccaacaaggccctgcctgctcctatcgagaaaaccatcagcaaggccaagggccagcctagggaaccccaggtttacacccttcctccatgccgggatgagctgaccaagaaccaggtgtccctgtggtgtctcgtgaagggcttctaccccagcgacattgccgtggaatgggagagcaatggccagcctgagaacaactacaagacaacccctcctgtgctggacagcgacggctcattcttcctgtacagcaagctgacagtggacaagtccagatggcagcagggcaacgtgttcagctgcagcgtgctgcatgaagccctgcacagccactacacccagaagtccctgtctctgtctcctggctga

SEQ ID NO: 770 - DNA, 1824 bp, synthetic construct
  misc_feature 1..1824: note = B1-182_A19-46 CODVH holeLS - DNA
  source 1..1824: mol_type = other DNA
atgggctggtcctgcatcatcctgtttctggtggccacagccaccggtgtccacagccaggtgcagctggttgaatctggtggcggagttgtgcagcctggcagaagcctgagactgtcttgtgccgccagcggctttaccctgagcagctatggaatgcactgggtccgacaggcccctggcaaaggacttgaatgggtcgccgtgatcagctacgacggcagcaacaagtactacgtggacagcgtgaagggcagattcaccatcagccgggacaacagcaagaacaccctgtacctgcagatgaacagcctgagagccgaggacaccgccgtgtactattgtgccagaggctgggcctattgggagctgctgcccgattactactacggcatggatgtgtggggccagggcaccacagtgaccgtgtctagcgataagacccacacacagatgcagctcgtgcagagcggccctgaagtgaagaaacctggcacctccgtgaaggtgtcctgcaaggcctctggcttcacctttacaagcagcgccgtgcagtgggttcgacaagctagaggccagagactggaatggatcggctggatcgttgtcggcagcggcaacaccaattacgcccagaaattccaagagcgcgtgaccatcaccagagacatgagcaccagcaccgcctacatggaactgtctagcctgcggagcgaggatacagctgtgtactactgcgccgctccttactgtagcggcggcagctgctttgacggctttgacatttggggacagggaaccatggtcaccgtgtcctctgacaagacacacaccgcctctacaaagggcccctccgtgtttcctctggctcccagcagcaagtctacaagcggaggaacagccgctctgggctgcctggtcaaggattactttcccgagcctgtgaccgtgtcctggaattctggcgctctgacaagcggcgtgcacacctttccagctgtgctgcaaagcagcggcctgtactctctgagcagcgtggtcacagtgcctagctctagcctgggcacccagacctacatctgcaatgtgaaccacaagcctagcaacaccaaggtggacaagaaggtggaacccaagagctgcgacaagacccacacctgtcctccatgtcctgctccagaactgctcggcggaccttctgtgttcctgtttcctccaaagcctaaggacaccctgatgatcagcagaacccctgaagtgacctgcgtggtggtggatgtgtctcacgaggaccccgaagtgaagttcaattggtacgtggacggcgtggaagtgcacaacgccaagaccaagcctagagaggaacagtacaacagcacctacagagtggtgtccgtgctgaccgtgctgcaccaggattggctgaacggcaaagagtacaagtgcaaggtgtccaacaaggccctgcctgctcctatcgagaaaaccatcagcaaggccaagggccagcctcgcgaacctcaagtctgtacactgcctcctagccgggacgagctgaccaagaatcaggtgtccctgagctgtgccgtgaagggcttttaccccagcgacattgccgtggaatgggagagcaatggccagcctgagaacaactacaagacaacccctcctgtgctggacagcgacggctcattcttcctggtgtccaagctgacagtggacaagtccagatggcagcagggcaacgtgttcagctgcagcgtgctgcatgaagccctgcacagccactacacccagaagtccctgtctctgtctcctggctga

SEQ ID NO: 771 - DNA, 1065 bp, synthetic construct
  misc_feature 1..1065: note = B1-182_A19-46 CODVL - DNA
  source 1..1065: mol_type = other DNA
atgggctggtcctgcatcatcctgtttctggtggccacagccaccggtgtccacagcgagatcgtgctgacacagagccctggcacactgtcactgtctccaggcgaaagagccacactgagctgtagagccagccagagcgtgtccagctcttacctggcttggtatcagcagaagcccggacaggctcccagactgctgatctatggcgcctctagcagagccaccggctttcccgatagattttctggcagcggctccggcaccgacttcaccctgacaatcagcagactggaacccgaggacttcgccgtgtactactgtcagcagtacggcaacagcccctggacatttggccagggcaccaaggtggaaatccgggacaagacccacacacagaccgtggtcacacaagagcccagcttctctgtgtctcctggcggcacagtgaccctgacatgtggacttagcagcggatctgtgtccaccgcctactttcccagctggtatcaacagaccccaggccaggcacctcggacactgatctacggcaccaacacaagatccagcggcgtgcccgataggttcagcggctctatcctgggaaacaaggccgcactgactatcacaggcgcccaggccgatgacgagagcgattactactgcgtgctgtacatgggcagaggcatcgtggtttttggcggaggcaccaagctgaccgtgctggataagacacacacccgtacggtggccgctcctagcgtgttcatcttcccaccttccgacgagcagctgaagtctggcacagcctctgtcgtgtgcctgctgaacaacttctaccccagagaagccaaggtgcagtggaaggtggacaacgccctgcagagcggcaatagccaagagagcgtgaccgagcaggacagcaaggactctacctacagcctgagcagcaccctgacactgagcaaggccgactacgagaagcacaaagtgtacgcctgcgaagtgacccaccagggcctttctagccctgtgaccaagagcttcaaccggggcgaatgttga

SEQ ID NO: 772 - DNA, 1056 bp, synthetic construct
  misc_feature 1..1056: note = B1-182_A19-61 CODVL - DNA
  source 1..1056: mol_type = other DNA
atgggctggtcctgcatcatcctgtttctggtggccacagccaccggtgtccacagcgagatcgtgctgacacagagccctggcacactgtcactgtctccaggcgaaagagccacactgagctgtagagccagccagagcgtgtccagctcttacctggcttggtatcagcagaagcccggacaggctcccagactgctgatctatggcgcctctagcagagccaccggctttcccgatagattttctggcagcggctccggcaccgacttcaccctgacaatcagcagactggaacccgaggacttcgccgtgtactactgtcagcagtacggcaacagcccctggacatttggccagggcaccaaggtggaaatccgggacaagacccacaccgacatccagatgacccagtctccaagcagcgtgtccgcctctgtgggcgacagagtgatcatcacatgcagagcctctcagggcatcagctcttggctcgcctggtatcaacaaaagcctggcaaggcccctaaggtcctgatctacgatgccagctctctgcagtctggcgtgcccagcagattttccggctctggctacggcacagatttcacactcaccataagcagcctgcagcctgaggacagcgccacctattattgccagcaggccaagtctttccccatcaccttcggccagggaacaagactggaaatcaaggataagacgcacacacgtacggtggccgctcctagcgtgttcatcttcccaccttccgacgagcagctgaagtctggcacagcctctgtcgtgtgcctgctgaacaacttctaccccagagaagccaaggtgcagtggaaggtggacaacgccctgcagagcggcaatagccaagagagcgtgaccgagcaggacagcaaggactctacctacagcctgagcagcaccctgacactgagcaaggccgactacgagaagcacaaagtgtacgcctgcgaagtgacccaccagggcctttctagccctgtgaccaagagcttcaaccggggcgaatgttga

SEQ ID NO: 773 - DNA, 1815 bp, synthetic construct
  misc_feature 1..1815: note = B1-182_B1-182 CODVH holeLS - DNA
  source 1..1815: mol_type = other DNA
atgggctggtcctgcatcatcctgtttctggtggccacagccaccggtgtccacagccagatgcagctggtgcagtctggccccgaagtgaagaaacctggcaccagcgtgaaggtgtcctgcaaggccagcggcttcacctttacaagctctgccgtgcagtgggtccgacaggctagaggacaacggctggaatggatcggctggatcgttgtcggcagcggcaacaccaattacgcccagaaattccaagagcgcgtgaccatcaccagagacatgagcaccagcaccgcctacatggaactgagcagcctgagaagcgaggacaccgccgtgtactattgcgccgctccttactgtagcggcggcagctgctttgacggctttgacatttggggccagggcaccatggtcaccgtgtcctctgataagacccacacccagatgcagctggtgcagtctggccccgaagtgaagaaacctggcaccagcgtgaaggtgtcctgcaaggcttctggcttcaccttcacaagcagcgccgtgcagtgggtccgacaggctagaggacagagactggaatggatcggctggatcgtcgtcggcagcggcaacacaaactacgcccagaaattccaagagcgcgtgaccatcaccagagacatgagcaccagcaccgcctacatggaactgagcagcctgagaagcgaggacaccgccgtgtactactgtgccgctccttactgtagcggcggcagctgtttcgacggctttgacatttggggccagggcaccatggtcaccgtgtctagcgacaagacccacaccgcctctacaaagggcccctccgtgtttcctctggctcccagcagcaagtctacaagcggaggaacagccgctctgggctgcctggtcaaggattactttcccgagcctgtgaccgtgtcctggaattctggcgctctgacaagcggcgtgcacacctttccagctgtgctgcaaagcagcggcctgtactctctgagcagcgtggtcacagtgcctagctctagcctgggcacccagacctacatctgcaatgtgaaccacaagcctagcaacaccaaggtggacaagaaggtggaacccaagagctgcgacaagacccacacctgtcctccatgtcctgctccagaactgctcggcggaccttctgtgttcctgtttcctccaaagcctaaggacaccctgatgatcagcagaacccctgaagtgacctgcgtggtggtggatgtgtctcacgaggaccccgaagtgaagttcaattggtacgtggacggcgtggaagtgcacaacgccaagaccaagcctagagaggaacagtacaacagcacctacagagtggtgtccgtgctgaccgtgctgcaccaggattggctgaacggcaaagagtacaagtgcaaggtgtccaacaaggccctgcctgctcctatcgagaaaaccatcagcaaggccaagggccagcctcgcgaacctcaagtctgtacactgcctcctagccgggacgagctgaccaagaatcaggtgtccctgagctgtgccgtgaagggcttttaccccagcgacattgccgtggaatgggagagcaatggccagcctgagaacaactacaagacaacccctcctgtgctggacagcgacggctcattcttcctggtgtccaagctgacagtggacaagtccagatggcagcagggcaacgtgttcagctgcagcgtgctgcatgaagccctgcacagccactacacccagaagtccctgtctctgtctcctggctga

SEQ ID NO: 774 - DNA, 1059 bp, synthetic construct
  misc_feature 1..1059: note = B1-182_B1-182 CODVL - DNA
  source 1..1059: mol_type = other DNA
atgggctggtcctgcatcatcctgtttctggtggccacagccaccggtgtccacagcgagatcgtgctgacacagagccctggcacactgtcactgtctccaggcgaaagagccacactgagctgtagagccagccagagcgtgtccagctcttacctggcttggtatcagcagaagcccggacaggctcccagactgctgatctatggcgcctctagcagagccaccggctttcccgatagattttctggcagcggctccggcaccgacttcaccctgacaatcagcagactggaacccgaggacttcgccgtgtactactgtcagcagtacggcaacagcccctggacatttggccagggcaccaaggtggaaatccgggacaagacccacaccgagatcgtgctgacccagtctccaggcacactgtctcttagcccaggcgagagagctaccctgtcctgtagagcctctcagtccgtgtcctcctcttacctggcctggtatcagcagaagccaggacaggctcccaggctgctgatctatggcgcttcttccagagccaccggctttcccgatagattctccggctctggatctggcaccgacttcaccctgaccatctccagactggaacccgaggacttcgccgtgtactactgccagcagtacggcaactccccatggaccttcggacagggcaccaaggtggaaatcagggacaagacccacacccgtacggtggccgctcctagcgtgttcatcttcccaccttccgacgagcagctgaagtctggcacagcctctgtcgtgtgcctgctgaacaacttctaccccagagaagccaaggtgcagtggaaggtggacaacgccctgcagagcggcaatagccaagagagcgtgaccgagcaggacagcaaggactctacctacagcctgagcagcaccctgacactgagcaaggccgactacgagaagcacaaagtgtacgcctgcgaagtgacccaccagggcctttctagccctgtgaccaagagcttcaaccggggcgaatgttga

SEQ ID NO: 775 - DNA, 1416 bp, synthetic construct
  misc_feature 1..1416: note = B1-182_monoH_knobLS - DNA
  source 1..1416: mol_type = other DNA
atgggctggtcctgcatcatcctgtttctggtggccacagccaccggtgtccacagccagatgcagctggtgcagtctggccccgaagtgaagaaacctggcaccagcgtgaaggtgtcctgcaaggccagcggcttcacctttacaagctctgccgtgcagtgggtccgacaggctagaggacaacggctggaatggatcggctggatcgttgtcggcagcggcaacaccaattacgcccagaaattccaagagcgcgtgaccatcaccagagacatgagcaccagcaccgcctacatggaactgagcagcctgagaagcgaggacaccgccgtgtactattgcgccgctccttactgtagcggcggcagctgctttgacggctttgacatttggggccagggcaccatggtcaccgttagctctgcctctacaaagggcccctccgtgtttcctctggctcccagcagcaagtctacaagcggaggaacagccgctctgggctgcctggtcaaggattactttcccgagcctgtgaccgtgtcctggaattctggcgctctgacaagcggcgtgcacacctttccagctgtgctgcaaagcagcggcctgtactctctgagcagcgtggtcacagtgcctagctctagcctgggcacccagacctacatctgcaatgtgaaccacaagcctagcaacaccaaggtggacaagaaggtggaacccaagagctgcgacaagacccacacctgtcctccatgtcctgctccagaactgctcggcggaccttctgtgttcctgtttcctccaaagcctaaggacaccctgatgatcagcagaacccctgaagtgacctgcgtggtggtggatgtgtctcacgaggaccccgaagtgaagttcaattggtacgtggacggcgtggaagtgcacaacgccaagaccaagcctagagaggaacagtacaacagcacctacagagtggtgtccgtgctgaccgtgctgcaccaggattggctgaacggcaaagagtacaagtgcaaggtgtccaacaaggccctgcctgctcctatcgagaaaaccatcagcaaggccaagggccagcctagggaaccccaggtttacacccttcctccatgccgggatgagctgaccaagaaccaggtgtccctgtggtgtctcgtgaagggcttctaccccagcgacattgccgtggaatgggagagcaatggccagcctgagaacaactacaagacaacccctcctgtgctggacagcgacggctcattcttcctgtacagcaagctgacagtggacaagtccagatggcagcagggcaacgtgttcagctgcagcgtgctgcatgaagccctgcacagccactacacccagaagtccctgtctctgtctcctggctga

SEQ ID NO: 776 - DNA, 702 bp, synthetic construct
  misc_feature 1..702: note = B1-182_monoL - DNA
  source 1..702: mol_type = other DNA
tcaacattcgccccggttgaagctcttggtcacagggctagaaaggccctggtgggtcacttcgcaggcgtacactttgtgcttctcgtagtcggccttgctcagtgtcagggtgctgctcaggctgtaggtagagtccttgctgtcctgctcggtcacgctctcttggctattgccgctctgcagggcgttgtccaccttccactgcaccttggcttctctggggtagaagttgttcagcaggcacacgacagaggctgtgccagacttcagctgctcgtcggaaggtgggaagatgaacacgctaggagcggccaccgtacggatttccaccttggtgccctggccaaatgtccaggggctgttgccgtactgctgacagtagtacacggcgaagtcctcgggttccagtctgctgattgtcagggtgaagtcggtgccggagccgctgccagaaaatctatcgggaaagccggtggctctgctagaggcgccatagatcagcagtctgggagcctgtccgggcttctgctgataccaagccaggtaagagctggacacgctctggctggctctacagctcagtgtggctctttcgcctggagacagtgacagtgtgccagggctctgtgtcagcacgatctcgctgtggacaccggtggctgtggccaccagaaacaggatgatgcaggaccagcccat

SEQ ID NO: 777 - DNA, 1827 bp, synthetic construct
  misc_feature 1..1827: note = B1-182 A19-61 CODVH holeLS - DNA
  source 1..1827: mol_type = other DNA
atgggctggtcctgcatcatcctgtttctggtggccacagccaccggtgtccacagccaggtgcagctggttgaatctggtggcggagttgtgcagcctggcagaagcctgagactgtcttgtgccgccagcggcttcacctttagcagctacgccttccactgggtccgacaggcacctggcaaaggccttgaatgggtcgccgtgatcagctacgacggcagcaatcagtactacgccgacagcgtgaagggcagattcaccatcagccgggacaacagcaagaacaccctgtacctgcagatgaacagcctgagagccgacgacaccgccgtgtactattgtgcccgcgatctggccattgccgtggccggaacatggcactactacaacggcatggatgtgtggggccagggcaccacagtgaccgtgtctagcgataagacccacacacagatgcagctcgtgcagagcggccctgaagtgaagaaacctggcacctccgtgaaggtgtcctgcaaggcctccggctttaccttcacaagctctgccgtgcagtgggttcgacaagccagaggccaacggctggaatggatcggctggatcgttgtcggcagcggcaacaccaattacgcccagaaattccaagagcgcgtgaccatcaccagagacatgagcaccagcaccgcctacatggaactgtctagcctgcggagcgaggatacagccgtgtattactgcgccgctccttactgtagcggcggcagctgctttgacggctttgacatttggggacagggaaccatggtcaccgtgtcctctgacaagacacacaccgcctctacaaagggcccctccgtgtttcctctggctcccagcagcaagtctacaagcggaggaacagccgctctgggctgcctggtcaaggattactttcccgagcctgtgaccgtgtcctggaattctggcgctctgacaagcggcgtgcacacctttccagctgtgctgcaaagcagcggcctgtactctctgagcagcgtggtcacagtgcctagctctagcctgggcacccagacctacatctgcaatgtgaaccacaagcctagcaacaccaaggtggacaagaaggtggaacccaagagctgcgacaagacccacacctgtcctccatgtcctgctccagaactgctcggcggaccttctgtgttcctgtttcctccaaagcctaaggacaccctgatgatcagcagaacccctgaagtgacctgcgtggtggtggatgtgtctcacgaggaccccgaagtgaagttcaattggtacgtggacggcgtggaagtgcacaacgccaagaccaagcctagagaggaacagtacaacagcacctacagagtggtgtccgtgctgaccgtgctgcaccaggattggctgaacggcaaagagtacaagtgcaaggtgtccaacaaggccctgcctgctcctatcgagaaaaccatcagcaaggccaagggccagcctcgcgaacctcaagtctgtacactgcctcctagccgggacgagctgaccaagaatcaggtgtccctgagctgtgccgtgaagggcttttaccccagcgacattgccgtggaatgggagagcaatggccagcctgagaacaactacaagacaacccctcctgtgctggacagcgacggctcattcttcctggtgtccaagctgacagtggacaagtccagatggcagcagggcaacgtgttcagctgcagcgtgctgcatgaagccctgcacagccactacacccagaagtccctgtctctgtctcctggctga

SEQ ID NO: 778 - DNA, 375 bp, synthetic construct
  misc_feature 1..375: note = E8 VH wild type (N62)   DNA
  source 1..375: mol_type = other DNA
caggtcacactgcgcgagtctgggcctgctctggttaagccaacgcaaaccctgacactcacctgcactttttcgggtttcagtttgtcaacacgtggcgtttgcgtttcctggatccgccaaccacctggcaaagccctggagtggctggctttcatcgactgggacgatgacaagtactataacactagcttgaaaactcggctcacaatttcaaaggacacctccaagaaccaggtggtgctgaccatgaccaatgtccatcctgtggatacagccacttattattgtgcaagaatttctagccaccacgggtcttcctggtgcacgacctttgattactggggccagggagcactcgttaccgtctctgcc

SEQ ID NO: 779 - protein, 125 aa, synthetic construct
  REGION 1..125: note = E8 VH N62Q   peptide
QVTLRESGPALVKPTQTLTLTCTFSGFSLSTRGVCVSWIRQPPGKALEWLAFIDWDDDKYYQTSLKTRLTISKDTSKNQVVLTMTNVHPVDTATYYCARISSHHGSSWCTTFDYWGQGALVTVSA

SEQ ID NO: 780 - DNA, 375 bp, synthetic construct
  misc_feature 1..375: note = E8 VH N62Q   DNA
  source 1..375: mol_type = other DNA
caggtcacactgcgcgagtctgggcctgctctggttaagccaacgcaaaccctgacactcacctgcactttttcgggtttcagtttgtcaacacgtggcgtttgcgtttcctggatccgccaaccacctggcaaagccctggagtggctggctttcatcgactgggacgatgacaagtactatcagactagcttgaaaactcggctcacaatttcaaaggacacctccaagaaccaggtggtgctgaccatgaccaatgtccatcctgtggatacagccacttattattgtgcaagaatttctagccaccacgggtcttcctggtgcacgacctttgattactggggccagggagcactcgttaccgtctctgcc

SEQ ID NO: 781 - protein, 125 aa, synthetic construct
  REGION 1..125: note = E8 VH N62S   peptide
QVTLRESGPALVKPTQTLTLTCTFSGFSLSTRGVCVSWIRQPPGKALEWLAFIDWDDDKYYSTSLKTRLTISKDTSKNQVVLTMTNVHPVDTATYYCARISSHHGSSWCTTFDYWGQGALVTVSA

SEQ ID NO: 782 - DNA, 375 bp, synthetic construct
  misc_feature 1..375: note = E8 VH N62S   DNA
  source 1..375: mol_type = other DNA
caggtcacactgcgcgagtctgggcctgctctggttaagccaacgcaaaccctgacactcacctgcactttttcgggtttcagtttgtcaacacgtggcgtttgcgtttcctggatccgccaaccacctggcaaagccctggagtggctggctttcatcgactgggacgatgacaagtactatagcactagcttgaaaactcggctcacaatttcaaaggacacctccaagaaccaggtggtgctgaccatgaccaatgtccatcctgtggatacagccacttattattgtgcaagaatttctagccaccacgggtcttcctggtgcacgacctttgattactggggccagggagcactcgttaccgtctctgcc

SEQ ID NO: 783 - protein, 220 aa, synthetic construct
  REGION 1..220: note = E8 VL in expression plasmid - peptide
DTVMTQSPLSLPVTPGEPASISCRSSQSLLNSNGYNYLDWYVQKPGQSPQLLIYLGSNRASGVPDRFSGSGSGTDFTLKISRVEAEDVGVYYCMQPLQTPLFTFGPGTKVEIKRTVAAPSVFIFPPSDEQLKSGTASVVCLLNNFYPREAKVQWKVDNALQSGNSQESVTEQDSKDSTYSLSSTLTLSKADYEKHKVYACEVTHQGLSSPVTKSFNRGEC

SEQ ID NO: 784 - DNA, 660 bp, synthetic construct
  misc_feature 1..660: note = E8 VL in expression plasmid - DNA
  source 1..660: mol_type = other DNA
gataccgtcatgacccagagccctctgagtctacccgtcactcctggagaaccagcctccatctcctgtcgaagtagtcaaagtctcctgaactccaatggctacaactatctggactggtacgtccaaaaacccggacaaagcccacaactcctgatctatctgggtagcaaccgggcaagcggcgtgcccgataggttcagtggctcagggtcgggaaccgacttcaccctcaaaatcagcagggttgaggctgaagatgttggagtgtactactgcatgcaaccgctccaaactccattgttcacatttgggcccggaaccaaggtggagatcaaacgtacggtggctgcaccatctgtcttcatcttcccgccatctgatgagcagttgaaatctggaactgcctctgttgtgtgcctgctgaataacttctatcccagagaggccaaagtacagtggaaggtggataacgccctccaatcgggtaactcccaggagagtgtcacagagcaggacagcaaggacagcacctacagcctcagcagcaccctgacgctgagcaaagcagactacgagaaacacaaagtctacgcctgcgaagtcacccatcagggcctgagctcgcccgtcacaaagagcttcaacaggggagagtgt

SEQ ID NO: 785 - protein, 449 aa, synthetic construct
  REGION 1..449: note = E8 VH N62Q in expression plasmid   peptide
QVTLRESGPALVKPTQTLTLTCTFSGFSLSTRGVCVSWIRQPPGKALEWLAFIDWDDDKYYNTSLKTRLTISKDTSKNQVVLTMTNVHPVDTATYYCARISSHHGSSWCTTFDYWGQGALVTVSAASTKGPSVFPLAPSSKSTSGGTAALGCLVKDYFPEPVTVSWNSGALTSGVHTFPAVLQSSGSLSSVVTVPSSSLGTQTYICNVNHKPSNTKVDKKVEPKSCDKTHTCPPCPAPELLGGPSVFLFPPKPKDTLMISRTPEVTCVVVDVSHEDPEVKFNWYVDGVEVHNAKTKPREEQYNSYVVSVLTVLHQDWLNGKEYKCKVSNKALPAPIEKTISKAKGQPREPQVYTLPPSRDELTKNQVSLTCLVKGFYPSDIAVEWESNGQPENNYKTTPPVLDSDGSFFKKLTVDKSRWQQGNVFSCSVLHEALHSHYTQKSLSLSPGK

SEQ ID NO: 786 - DNA, 1365 bp, synthetic construct
  misc_feature 1..1365: note = E8 VH N62Q in expression plasmid   DNA
  source 1..1365: mol_type = other DNA
caggtcacactgcgcgagtctgggcctgctctggttaagccaacgcaaaccctgacactcacctgcactttttcgggtttcagtttgtcaacacgtggcgtttgcgtttcctggatccgccaaccacctggcaaagccctggagtggctggctttcatcgactgggacgatgacaagtactataacactagcttgaaaactcggctcacaatttcaaaggacacctccaagaaccaggtggtgctgaccatgaccaatgtccatcctgtggatacagccacttattattgtgcaagaatttctagccaccacgggtcttcctggtgcacgacctttgattactggggccagggagcactcgttaccgtctctgccgctagcaccaagggcccatcggtcttccccctggcaccctcctccaagagcacctctgggggcacagcggccctgggctgcctggtcaaggactacttccccgaaccggtgacggtgtcgtggaactcaggcgccctgaccagcggcgtgcacaccttcccggccgtcctacagtcctcaggactctactccctcagcagcgtggtgaccgtgccctccagcagcttgggcacccagacctacatctgcaacgtgaatcacaagcccagcaacaccaaggtggacaagaaggttgagcccaaatcttgtgacaaaactcacacatgcccaccgtgcccagcacctgaactcctggggggaccgtcagtcttcctcttccccccaaaacccaaggacaccctcatgatctcccggacccctgaggtcacatgcgtggtggtggacgtgagccacgaagaccctgaggtcaagttcaactggtacgtggacggcgtggaggtgcataatgccaagacaaagccgcgggaggagcagtacaacagcacgtaccgtgtggtcagcgtcctcaccgtcctgcaccaggactggctgaatggcaaggagtacaagtgcaaggtctccaacaaagccctcccagcccccatcgagaaaaccatctccaaagccaaagggcagccccgagaaccacaggtgtacaccctgcccccatcccgggacgagctgaccaagaaccaggtcagcctgacctgcctggtcaaaggcttctatcccagcgacatcgccgtggagtgggagagcaatgggcagccggagaacaactacaagaccacgcctcccgtgctggactccgacggctccttcttcctctacagcaagctcaccgtggacaagagcaggtggcagcaggggaacgtcttctcatgctccgtgctccatgaggctctgcacagccactacacgcagaagagcctctccctgtctccgggcaaa

SEQ ID NO: 787 - protein, 449 aa, synthetic construct
  REGION 1..449: note = E8 VH N62S in expression plasmid   peptide
QVTLRESGPALVKPTQTLTLTCTFSGFSLSTRGVCVSWIRQPPGKALEWLAFIDWDDDKYYSTSLKTRLTISKDTSKNQVVLTMTNVHPVDTATYYCARISSHHGSSWCTTFDYWGQGALVTVSAASTKGPSVFPLAPSSKSTSGGTAALGCLVKDYFPEPVTVSWNSGALTSGVHTFPAVLQSSGSLSSVVTVPSSSLGTQTYICNVNHKPSNTKVDKKVEPKSCDKTHTCPPCPAPELLGGPSVFLFPPKPKDTLMISRTPEVTCVVVDVSHEDPEVKFNWYVDGVEVHNAKTKPREEQYNSYVVSVLTVLHQDWLNGKEYKCKVSNKALPAPIEKTISKAKGQPREPQVYTLPPSRDELTKNQVSLTCLVKGFYPSDIAVEWESNGQPENNYKTTPPVLDSDGSFFKKLTVDKSRWQQGNVFSCSVLHEALHSHYTQKSLSLSPGK

SEQ ID NO: 788 - DNA, 1365 bp, synthetic construct
  misc_feature 1..1365: note = E8 VH N62S in expression plasmid   DNA
  source 1..1365: mol_type = other DNA
caggtcacactgcgcgagtctgggcctgctctggttaagccaacgcaaaccctgacactcacctgcactttttcgggtttcagtttgtcaacacgtggcgtttgcgtttcctggatccgccaaccacctggcaaagccctggagtggctggctttcatcgactgggacgatgacaagtactattccactagcttgaaaactcggctcacaatttcaaaggacacctccaagaaccaggtggtgctgaccatgaccaatgtccatcctgtggatacagccacttattattgtgcaagaatttctagccaccacgggtcttcctggtgcacgacctttgattactggggccagggagcactcgttaccgtctctgccgctagcaccaagggcccatcggtcttccccctggcaccctcctccaagagcacctctgggggcacagcggccctgggctgcctggtcaaggactacttccccgaaccggtgacggtgtcgtggaactcaggcgccctgaccagcggcgtgcacaccttcccggccgtcctacagtcctcaggactctactccctcagcagcgtggtgaccgtgccctccagcagcttgggcacccagacctacatctgcaacgtgaatcacaagcccagcaacaccaaggtggacaagaaggttgagcccaaatcttgtgacaaaactcacacatgcccaccgtgcccagcacctgaactcctggggggaccgtcagtcttcctcttccccccaaaacccaaggacaccctcatgatctcccggacccctgaggtcacatgcgtggtggtggacgtgagccacgaagaccctgaggtcaagttcaactggtacgtggacggcgtggaggtgcataatgccaagacaaagccgcgggaggagcagtacaacagcacgtaccgtgtggtcagcgtcctcaccgtcctgcaccaggactggctgaatggcaaggagtacaagtgcaaggtctccaacaaagccctcccagcccccatcgagaaaaccatctccaaagccaaagggcagccccgagaaccacaggtgtacaccctgcccccatcccgggacgagctgaccaagaaccaggtcagcctgacctgcctggtcaaaggcttctatcccagcgacatcgccgtggagtgggagagcaatgggcagccggagaacaactacaagaccacgcctcccgtgctggactccgacggctccttcttcctctacagcaagctcaccgtggacaagagcaggtggcagcaggggaacgtcttctcatgctccgtgctccatgaggctctgcacagccactacacgcagaagagcctctccctgtctccgggcaaa
